United States Patent Application Publication US 2024/0401047 A1 - sequence listing, part 4

SEQ ID NO: 9018 - RNA, 86 nt, synthetic construct; identical to SEQ ID NO: 3290
  source 1..86: mol_type = other RNA
  modified_base 1: mod_base = OTHER; note = 2'-Omethyladenosine
  modified_base 14: mod_base = OTHER; note = 2'-Omethyladenosine
  modified_base 15: mod_base = OTHER; note = 2'-Omethylguanosine
  modified_base 16: mod_base = OTHER; note = 2'-Omethyluridine
  modified_base 17: mod_base = OTHER; note = 2'-Omethylguanosine
  modified_base 18: mod_base = OTHER; note = 2'-Omethylguanosine
  modified_base 19: mod_base = OTHER; note = Uridine phosphorothiorate
  modified_base 20: mod_base = OTHER; note = 2'-Omethyluridine
  modified_base 21: mod_base = OTHER; note = Adenosine phosphorothiorate
  modified_base 33: mod_base = OTHER; note = Uridine phosphorothiorate
  modified_base 34: mod_base = OTHER; note = 2'-Omethyluridine
  modified_base 35: mod_base = OTHER; note = Cytosine phosphorothiorate
  modified_base 37: mod_base = OTHER; note = Guanosine phosphorothiorate
  modified_base 38: mod_base = OTHER; note = Adenosine phosphorothiorate
  modified_base 41: mod_base = OTHER; note = 2'-Omethylcytosine
  modified_base 42: mod_base = OTHER; note = 2'-Omethyladenosine
  modified_base 43: mod_base = OTHER; note = 2'-Omethyladenosine
  modified_base 44: mod_base = OTHER; note = 2'-Omethyluridine
  modified_base 60: mod_base = OTHER; note = 2'-Omethyluridine
  modified_base 62: mod_base = OTHER; note = 2'-Omethylguanosine
  modified_base 83: mod_base = OTHER; note = 2'-Omethyladenosine

SEQ ID NO: 9019 - DNA, 76 bp, synthetic construct; identical to SEQ ID NO: 1924
  source 1..76: mol_type = other DNA
  misc_feature 1..31: note = RNA
  misc_feature 32..38: note = DNA
  misc_feature 39..76: note = RNA

SEQ ID NO: 9020 - RNA, 85 nt, synthetic construct; identical to SEQ ID NO: 3288
  source 1..85: mol_type = other RNA
  modified_base 1: mod_base = OTHER; note = 2'-Omethylcytosine
  modified_base 21: mod_base = OTHER; note = 2'-fluoroadenosine
  modified_base 25: mod_base = OTHER; note = Guanosine phosphorothiorate
  modified_base 26: mod_base = OTHER; note = 2'-fluorouridine
  modified_base 28: mod_base = OTHER; note = 2'-Omethylguanosine
  modified_base 30: mod_base = OTHER; note = 2'-fluoroadenosine
  modified_base 33: mod_base = OTHER; note = 2'-fluorouridine
  modified_base 34: mod_base = OTHER; note = 2'-fluorocytosine
  modified_base 35: mod_base = OTHER; note = 2'-fluoroadenosine phosphorothiorate
  modified_base 39: mod_base = OTHER; note = 2'-fluorocytosine phosphorothiorate
  modified_base 50: mod_base = OTHER; note = Adenosine phosphorothiorate
  modified_base 52: mod_base = OTHER; note = 2'-fluoroguanosine
  modified_base 60: mod_base = OTHER; note = 2'-fluoroguanosine
  modified_base 73: mod_base = OTHER; note = 2'-fluoroadenosine
  modified_base 84: mod_base = OTHER; note = Cytosine phosphorothiorate
  modified_base 85: mod_base = OTHER; note = 2'-Omethyladenosine

SEQ ID NO: 9021 - RNA, 75 nt, synthetic construct; identical to SEQ ID NO: 3306
  source 1..75: mol_type = other RNA
  modified_base 1: mod_base = OTHER; note = 2'-Omethylguanosine phosphorothiorate
  modified_base 2: mod_base = OTHER; note = 2'-Omethyladenosine
  modified_base 3: mod_base = OTHER; note = 2'-Omethylcytosine
  modified_base 17: mod_base = OTHER; note = Guanosine phosphorothiorate
  modified_base 18: mod_base = OTHER; note = 2'-Omethylguanosine
  modified_base 19: mod_base = OTHER; note = Uridine phosphorothiorate
  modified_base 24: mod_base = OTHER; note = 2'-Omethylcytosine
  modified_base 28: mod_base = OTHER; note = 2'-Omethyluridine
  modified_base 34: mod_base = OTHER; note = Uridine phosphorothiorate
  modified_base 36: mod_base = OTHER; note = Guanosine phosphorothiorate
  modified_base 37: mod_base = OTHER; note = Adenosine phosphorothiorate
  modified_base 45: mod_base = OTHER; note = Guanosine phosphorothiorate
  modified_base 49: mod_base = OTHER; note = 2'-Omethylcytosine
  modified_base 51: mod_base = OTHER; note = 2'-Omethyluridine
  modified_base 53: mod_base = OTHER; note = Uridine phosphorothiorate
  modified_base 54: mod_base = OTHER; note = Uridine phosphorothiorate
  modified_base 55: mod_base = OTHER; note = 2'-Omethylcytosine
  modified_base 56: mod_base = OTHER; note = Adenosine phosphorothiorate
  modified_base 64: mod_base = OTHER; note = 2'-Omethyluridine
  modified_base 70: mod_base = OTHER; note = 2'-Omethyluridine
  modified_base 72: mod_base = OTHER; note = 2'-Omethyladenosine

SEQ ID NO: 9022 - RNA, 74 nt, synthetic construct; identical to SEQ ID NO: 3293
  source 1..74: mol_type = other RNA
  modified_base 3: mod_base = OTHER; note = 2'-fluorocytosine phosphorothiorate
  modified_base 8: mod_base = OTHER; note = 2'-fluoroguanosine
  modified_base 10: mod_base = OTHER; note = 2'-Omethylcytosine phosphorothiorate
  modified_base 42: mod_base = OTHER; note = Adenosine phosphorothiorate
  modified_base 63: mod_base = OTHER; note = 2'-fluorouridine
  modified_base 73: mod_base = OTHER; note = 2'-Omethylcytosine phosphorothiorate

SEQ ID NO: 9023 - RNA, 75 nt, synthetic construct; identical to SEQ ID NO: 3299
  source 1..75: mol_type = other RNA
  modified_base 3: mod_base = OTHER; note = Uridine phosphorothiorate
  modified_base 26: mod_base = OTHER; note = 2'-fluorouridine phosphorothiorate
  modified_base 28: mod_base = OTHER; note = 2'-fluoroadenosine
  modified_base 47: mod_base = OTHER; note = 2'-fluorocytosine
  modified_base 48: mod_base = OTHER; note = 2'-fluorocytosine
  modified_base 52: mod_base = OTHER; note = 2'-fluoroguanosine
  modified_base 73: mod_base = OTHER; note = Cytosine phosphorothiorate
  modified_base 74: mod_base = OTHER; note = 2'-Omethylcytosine
  modified_base 75: mod_base = OTHER; note = 2'-fluoroadenosine

SEQ ID NO: 9024 - RNA, 86 nt, synthetic construct; identical to SEQ ID NO: 3290
  source 1..86: mol_type = other RNA
  modified_base 24: mod_base = OTHER; note = 2'-Omethylguanosine

SEQ ID NO: 9025 - RNA, 85 nt, synthetic construct; identical to SEQ ID NO: 3297
  source 1..85: mol_type = other RNA
  modified_base 1: mod_base = OTHER; note = 2'-Omethylguanosine phosphorothiorate
  modified_base 2: mod_base = OTHER; note = 2'-Omethylcytosine
  modified_base 4: mod_base = OTHER; note = 2'-Omethylguanosine
  modified_base 33: mod_base = OTHER; note = 2'-fluorouridine
  modified_base 34: mod_base = OTHER; note = 2'-fluorouridine
  modified_base 46: mod_base = OTHER; note = 2'-Omethylguanosine
  modified_base 55: mod_base = OTHER; note = 2'-fluorocytosine
  modified_base 57: mod_base = OTHER; note = Cytosine phosphorothiorate
  modified_base 60: mod_base = OTHER; note = 2'-Omethyladenosine phosphorothiorate
  modified_base 84: mod_base = OTHER; note = 2'-Omethylcytosine phosphorothiorate

SEQ ID NO: 9026 - RNA, 85 nt, synthetic construct; identical to SEQ ID NO: 3297
  source 1..85: mol_type = other RNA
  modified_base 1: mod_base = OTHER; note = 2'-Omethylguanosine phosphorothiorate
  modified_base 2: mod_base = OTHER; note = 2'-Omethylcytosine phosphorothiorate
  modified_base 14: mod_base = OTHER; note = Adenosine phosphorothiorate
  modified_base 20: mod_base = OTHER; note = Uridine phosphorothiorate
  modified_base 21: mod_base = OTHER; note = 2'-fluoroadenosine
  modified_base 83: mod_base = OTHER; note = Cytosine phosphorothiorate
  modified_base 84: mod_base = OTHER; note = 2'-Omethylcytosine phosphorothiorate
  modified_base 85: mod_base = OTHER; note = 2'-Omethyladenosine

SEQ ID NO: 9027 - RNA, 76 nt, synthetic construct; identical to SEQ ID NO: 625
  source 1..76: mol_type = other RNA
  modified_base 1: mod_base = OTHER; note = 2'-Omethylguanosine
  modified_base 2: mod_base = OTHER; note = 2'-fluoroguanosine
  modified_base 4: mod_base = OTHER; note = Uridine phosphorothiorate
  modified_base 8: mod_base = OTHER; note = Uridine phosphorothiorate
  modified_base 10: mod_base = OTHER; note = 2'-fluoroguanosine
  modified_base 15: mod_base = OTHER; note = Adenosine phosphorothiorate
  modified_base 16: mod_base = OTHER; note = 2'-fluorouridine
  modified_base 18: mod_base = OTHER; note = 2'-fluoroguanosine
  modified_base 25: mod_base = OTHER; note = Cytosine phosphorothiorate
  modified_base 26: mod_base = OTHER; note = 2'-Omethyladenosine phosphorothiorate
  modified_base 27: mod_base = OTHER; note = 2'-Omethyluridine
  modified_base 28: mod_base = OTHER; note = 2'-Omethyluridine
  modified_base 34: mod_base = OTHER; note = 2'-fluorouridine
  modified_base 38: mod_base = OTHER; note = 2'-Omethyladenosine
  modified_base 39: mod_base = OTHER; note = 2'-Omethyluridine
  modified_base 42: mod_base = OTHER; note = Adenosine phosphorothiorate
  modified_base 43: mod_base = OTHER; note = Adenosine phosphorothiorate
  modified_base 44: mod_base = OTHER; note = Adenosine phosphorothiorate
  modified_base 45: mod_base = OTHER; note = 2'-fluoroguanosine
  modified_base 47: mod_base = OTHER; note = 2'-fluorouridine
  modified_base 49: mod_base = OTHER; note = Cytosine phosphorothiorate
  modified_base 50: mod_base = OTHER; note = 2'-fluorocytosine
  modified_base 52: mod_base = OTHER; note = 2'-Omethylguanosine
  modified_base 54: mod_base = OTHER; note = 2'-Omethyluridine phosphorothiorate
  modified_base 56: mod_base = OTHER; note = 2'-fluorocytosine phosphorothiorate
  modified_base 62: mod_base = OTHER; note = Cytosine phosphorothiorate
  modified_base 63: mod_base = OTHER; note = 2'-Omethylcytosine
  modified_base 64: mod_base = OTHER; note = Guanosine phosphorothiorate
  modified_base 67: mod_base = OTHER; note = Guanosine phosphorothiorate
  modified_base 68: mod_base = OTHER; note = 2'-fluoroguanosine
  modified_base 73: mod_base = OTHER; note = Guanosine phosphorothiorate
  modified_base 74: mod_base = OTHER; note = Cytosine phosphorothiorate
  modified_base 75: mod_base = OTHER; note = 2'-Omethylcytosine

SEQ ID NO: 9028 - RNA, 86 nt, synthetic construct; identical to SEQ ID NO: 3290
  source 1..86: mol_type = other RNA
  modified_base 39: mod_base = OTHER; note = 2'-fluorouridine

SEQ ID NO: 9029 - RNA, 76 nt, synthetic construct
  source 1..76: mol_type = other RNA
gccccagtggcctaatggataaggcatcggccttcaaagccggggattgtgggttcgagtcccatctggggtacca

SEQ ID NO: 9030 - RNA, 76 nt, synthetic construct; identical to SEQ ID NO: 625
  source 1..76: mol_type = other RNA
  modified_base 1: mod_base = OTHER; note = 2'-Omethylguanosine phosphorothiorate
  modified_base 2: mod_base = OTHER; note = 2'-Omethylguanosine
  modified_base 3: mod_base = OTHER; note = 2'-O-(2-Methoxyethyl) 5-methylcytosine
  modified_base 64: mod_base = OTHER; note = 2'-fluoroguanosine
  modified_base 74: mod_base = OTHER; note = Cytosine phosphorothiorate
  modified_base 75: mod_base = OTHER; note = 2'-Omethylcytosine

SEQ ID NO: 9031 - RNA, 76 nt, synthetic construct; identical to SEQ ID NO: 3447
  source 1..76: mol_type = other RNA
  modified_base 1: mod_base = OTHER; note = 2'-Omethylguanosine
  modified_base 2: mod_base = OTHER; note = 2'-Omethylcytosine
  modified_base 3: mod_base = OTHER; note = 2'-Omethylcytosine
  modified_base 4: mod_base = OTHER; note = 2'-Omethylcytosine
  modified_base 5: mod_base = OTHER; note = 2'-Omethylguanosine
  modified_base 6: mod_base = OTHER; note = 2'-Omethyladenosine
  modified_base 10: mod_base = OTHER; note = 2'-Omethylguanosine
  modified_base 11: mod_base = OTHER; note = 2'-Omethylcytosine
  modified_base 12: mod_base = OTHER; note = 2'-Omethylguanosine
  modified_base 13: mod_base = OTHER; note = 2'-Omethylcytosine
  modified_base 16: mod_base = OTHER; note = 2'-Omethyluridine
  modified_base 17: mod_base = OTHER; note = 2'-Omethylguanosine
  modified_base 18: mod_base = OTHER; note = 2'-Omethylguanosine
  modified_base 20: mod_base = OTHER; note = 2'-Omethyluridine
  modified_base 25: mod_base = OTHER; note = 2'-Omethylcytosine
  modified_base 33: mod_base = OTHER; note = 2'-fluorouridine
  modified_base 35: mod_base = OTHER; note = Cytosine phosphorothiorate
  modified_base 37: mod_base = OTHER; note = Adenosine phosphorothiorate
  modified_base 38: mod_base = OTHER; note = Adenosine phosphorothiorate
  modified_base 41: mod_base = OTHER; note = 2'-fluorocytosine
  modified_base 42: mod_base = OTHER; note = 2'-Omethyladenosine
  modified_base 43: mod_base = OTHER; note = 2'-Omethyladenosine
  modified_base 44: mod_base = OTHER; note = 2'-fluoroadenosine
  modified_base 49: mod_base = OTHER; note = 2'-Omethylcytosine
  modified_base 50: mod_base = OTHER; note = 2'-Omethylcytosine
  modified_base 52: mod_base = OTHER; note = 2'-Omethylguanosine
  modified_base 54: mod_base = OTHER; note = 2'-Omethyluridine
  modified_base 55: mod_base = OTHER; note = Uridine phosphorothiorate
  modified_base 56: mod_base = OTHER; note = 2'-Omethylcytosine
  modified_base 57: mod_base = OTHER; note = 2'-fluoroguanosine
  modified_base 59: mod_base = OTHER; note = 2'-Omethylguanosine
  modified_base 61: mod_base = OTHER; note = 2'-Omethylcytosine
  modified_base 65: mod_base = OTHER; note = 2'-Omethylguanosine
  modified_base 73: mod_base = OTHER; note = 2'-Omethylguanosine

SEQ ID NO: 9032 - RNA, 76 nt, synthetic construct; identical to SEQ ID NO: 625
  source 1..76: mol_type = other RNA
  modified_base 2: mod_base = OTHER; note = 2'-fluoroguanosine
  modified_base 3: mod_base = OTHER; note = 2'-fluorocytosine
  modified_base 5: mod_base = OTHER; note = Cytosine phosphorothiorate
  modified_base 6: mod_base = OTHER; note = 2'-Omethylcytosine
  modified_base 11: mod_base = OTHER; note = 2'-Omethylcytosine
  modified_base 14: mod_base = OTHER; note = 2'-Omethyladenosine
  modified_base 16: mod_base = OTHER; note = Uridine phosphorothiorate
  modified_base 20: mod_base = OTHER; note = Uridine phosphorothiorate
  modified_base 22: mod_base = OTHER; note = 2'-Omethylguanosine
  modified_base 29: mod_base = OTHER; note = Guanosine phosphorothiorate
  modified_base 33: mod_base = OTHER; note = 2'-fluorouridine
  modified_base 38: mod_base = OTHER; note = 2'-fluoroadenosine
  modified_base 39: mod_base = OTHER; note = Uridine phosphorothiorate
  modified_base 44: mod_base = OTHER; note = 2'-fluoroadenosine
  modified_base 45: mod_base = OTHER; note = Guanosine phosphorothiorate
  modified_base 46: mod_base = OTHER; note = 2'-Omethylguanosine
  modified_base 48: mod_base = OTHER; note = Uridine phosphorothiorate
  modified_base 49: mod_base = OTHER; note = 2'-fluorocytosine
  modified_base 50: mod_base = OTHER; note = 2'-fluorocytosine
  modified_base 51: mod_base = OTHER; note = Guanosine phosphorothiorate
  modified_base 52: mod_base = OTHER; note = 2'-fluoroguanosine
  modified_base 54: mod_base = OTHER; note = Uridine phosphorothiorate
  modified_base 55: mod_base = OTHER; note = Uridine phosphorothiorate
  modified_base 56: mod_base = OTHER; note = 2'-Omethylcytosine
  modified_base 59: mod_base = OTHER; note = 2'-fluoroguanosine
  modified_base 60: mod_base = OTHER; note = 2'-Omethyluridine
  modified_base 61: mod_base = OTHER; note = 2'-Omethylcytosine
  modified_base 62: mod_base = OTHER; note = 2'-Omethylcytosine
  modified_base 66: mod_base = OTHER; note = 2'-Omethylcytosine phosphorothiorate
  modified_base 67: mod_base = OTHER; note = 2'-Omethylguanosine
  modified_base 68: mod_base = OTHER; note = 2'-Omethylguanosine
  modified_base 69: mod_base = OTHER; note = Adenosine phosphorothiorate
  modified_base 71: mod_base = OTHER; note = Uridine phosphorothiorate
  modified_base 75: mod_base = OTHER; note = 2'-Omethylcytosine
  modified_base 76: mod_base = OTHER; note = 2'-fluoroadenosine

SEQ ID NO: 9033 - RNA, 76 nt, synthetic construct; identical to SEQ ID NO: 625
  source 1..76: mol_type = other RNA
  modified_base 3: mod_base = OTHER; note = 2'-fluorocytosine
  modified_base 5: mod_base = OTHER; note = 2'-fluorocytosine
  modified_base 6: mod_base = OTHER; note = 2'-fluorocytosine
  modified_base 7: mod_base = OTHER; note = Guanosine phosphorothiorate
  modified_base 9: mod_base = OTHER; note = Guanosine phosphorothiorate
  modified_base 10: mod_base = OTHER; note = 2'-Omethylguanosine
  modified_base 11: mod_base = OTHER; note = 2'-Omethylcytosine phosphorothiorate
  modified_base 12: mod_base = OTHER; note = 2'-fluoroguanosine
  modified_base 14: mod_base = OTHER; note = Adenosine phosphorothiorate
  modified_base 15: mod_base = OTHER; note = 2'-fluoroadenosine
  modified_base 16: mod_base = OTHER; note = 2'-Omethyluridine
  modified_base 17: mod_base = OTHER; note = 2'-Omethylguanosine phosphorothiorate
  modified_base 18: mod_base = OTHER; note = 2'-Omethylguanosine
  modified_base 20: mod_base = OTHER; note = 2'-fluorouridine
  modified_base 23: mod_base = OTHER; note = 2'-Omethylcytosine phosphorothiorate
  modified_base 24: mod_base = OTHER; note = 2'-fluoroguanosine
  modified_base 26: mod_base = OTHER; note = Adenosine phosphorothiorate
  modified_base 29: mod_base = OTHER; note = 2'-fluoroguanosine
  modified_base 30: mod_base = OTHER; note = 2'-fluoroguanosine phosphorothiorate
  modified_base 34: mod_base = OTHER; note = 2'-Omethyluridine
  modified_base 38: mod_base = OTHER; note = 2'-Omethyladenosine phosphorothiorate
  modified_base 39: mod_base = OTHER; note = 2'-Omethyluridine
  modified_base 43: mod_base = OTHER; note = 2'-Omethyladenosine
  modified_base 47: mod_base = OTHER; note = 2'-fluorouridine
  modified_base 48: mod_base = OTHER; note = 2'-Omethyluridine
  modified_base 49: mod_base = OTHER; note = 2'-Omethylcytosine
  modified_base 50: mod_base = OTHER; note = 2'-fluorocytosine phosphorothiorate
  modified_base 67: mod_base = OTHER; note = 2'-fluoroguanosine
  modified_base 68: mod_base = OTHER; note = Guanosine phosphorothiorate
  modified_base 70: mod_base = OTHER; note = 2'-fluoroguanosine phosphorothiorate
  modified_base 73: mod_base = OTHER; note = 2'-Omethylguanosine phosphorothiorate
  modified_base 74: mod_base = OTHER; note = 2'-Omethylcytosine
  modified_base 75: mod_base = OTHER; note = Cytosine phosphorothiorate
  modified_base 76: mod_base = OTHER; note = 2'-fluoroadenosine

SEQ ID NO: 9034 - DNA, 76 bp, synthetic construct; identical to SEQ ID NO: 1924
  source 1..76: mol_type = other DNA
  modified_base 1: mod_base = OTHER; note = 2'-Omethylguanosine phosphorothiorate
  modified_base 2: mod_base = OTHER; note = 2'-Omethylguanosine
  modified_base 3: mod_base = OTHER; note = 2'-Omethylcytosine
  modified_base 4: mod_base = OTHER; note = 2'-Omethyluridine
  modified_base 5: mod_base = OTHER; note = 2'-Omethylcytosine
  modified_base 6: mod_base = OTHER; note = 2'-Omethylcytosine
  modified_base 43: mod_base = OTHER; note = 2'-Omethyladenosine
  modified_base 44: mod_base = OTHER; note = 2'-Omethyladenosine
  modified_base 45: mod_base = OTHER; note = 2'-Omethylguanosine
  modified_base 46: mod_base = OTHER; note = 2'-fluoroguanosine
  modified_base 48: mod_base = OTHER; note = 2'-fluorouridine
  modified_base 49: mod_base = OTHER; note = 2'-Omethylcytosine
  modified_base 50: mod_base = OTHER; note = 2'-Omethylcytosine
  modified_base 73: mod_base = OTHER; note = 2'-Omethylguanosine
  misc_feature 1..46: note = RNA
  misc_feature 47: note = DNA
  misc_feature 48..76: note = RNA

SEQ ID NO: 9035 - RNA, 85 nt, synthetic construct; identical to SEQ ID NO: 3288
  source 1..85: mol_type = other RNA
  modified_base 1: mod_base = OTHER; note = 2'-Omethylcytosine
  modified_base 13: mod_base = OTHER; note = Adenosine phosphorothiorate
  modified_base 16: mod_base = OTHER; note = Guanosine phosphorothiorate
  modified_base 17: mod_base = OTHER; note = 2'-fluoroguanosine phosphorothiorate
  modified_base 28: mod_base = OTHER; note = 2'-fluoroguanosine
  modified_base 30: mod_base = OTHER; note = 2'-fluoroadenosine
  modified_base 33: mod_base = OTHER; note = 2'-fluorouridine
  modified_base 35: mod_base = OTHER; note = 2'-fluoroadenosine
  modified_base 38: mod_base = OTHER; note = Uridine phosphorothiorate
  modified_base 43: mod_base = OTHER; note = 2'-Omethyluridine
  modified_base 51: mod_base = OTHER; note = 2'-Omethyluridine
  modified_base 54: mod_base = OTHER; note = 2'-Omethylcytosine
  modified_base 55: mod_base = OTHER; note = 2'-Omethylcytosine
  modified_base 57: mod_base = OTHER; note = 2'-Omethylcytosine
  modified_base 65: mod_base = OTHER; note = Cytosine phosphorothiorate
  modified_base 73: mod_base = OTHER; note = 2'-fluoroadenosine
  modified_base 75: mod_base = OTHER; note = Uridine phosphorothiorate
  modified_base 77: mod_base = OTHER; note = 2'-fluorocytosine
  modified_base 82: mod_base = OTHER; note = Adenosine phosphorothiorate
  modified_base 84: mod_base = OTHER; note = Cytosine phosphorothiorate

SEQ ID NO: 9036 - RNA, 85 nt, synthetic construct; identical to SEQ ID NO: 3297
  source 1..85: mol_type = other RNA
  modified_base 1: mod_base = OTHER; note = 2'-Omethylguanosine phosphorothiorate
  modified_base 2: mod_base = OTHER; note = 2'-Omethylcytosine phosphorothiorate
  modified_base 3: mod_base = OTHER; note = 2'-Omethyluridine
  modified_base 4: mod_base = OTHER; note = 2'-Omethylguanosine
  modified_base 5: mod_base = OTHER; note = 2'-Omethyluridine
  modified_base 6: mod_base = OTHER; note = 2'-Omethylguanosine
  modified_base 16: mod_base = OTHER; note = 2'-Omethyluridine
  modified_base 17: mod_base = OTHER; note = 2'-Omethylguanosine
  modified_base 18: mod_base = OTHER; note = 2'-Omethylguanosine
  modified_base 20: mod_base = OTHER; note = 2'-Omethyluridine phosphorothiorate
  modified_base 25: mod_base = OTHER; note = 2'-Omethylcytosine
  modified_base 33: mod_base = OTHER; note = 2'-fluorouridine
  modified_base 35: mod_base = OTHER; note = Cytosine phosphorothiorate
  modified_base 37: mod_base = OTHER; note = Adenosine phosphorothiorate
  modified_base 38: mod_base = OTHER; note = Adenosine phosphorothiorate
  modified_base 41: mod_base = OTHER; note = 2'-fluorocytosine phosphorothiorate
  modified_base 42: mod_base = OTHER; note = 2'-Omethyladenosine
  modified_base 43: mod_base = OTHER; note = 2'-Omethyladenosine
  modified_base 44: mod_base = OTHER; note = 2'-Omethyluridine
  modified_base 56: mod_base = OTHER; note = 2'-fluoroguanosine
  modified_base 57: mod_base = OTHER; note = 2'-fluorocytosine
  modified_base 65: mod_base = OTHER; note = 2'-Omethylcytosine
  modified_base 68: mod_base = OTHER; note = 2'-Omethyladenosine
  modified_base 70: mod_base = OTHER; note = 2'-Omethylcytosine
  modified_base 71: mod_base = OTHER; note = 2'-Omethylcytosine
  modified_base 72: mod_base = OTHER; note = 2'-fluorouridine
  modified_base 73: mod_base = OTHER; note = 2'-Omethylguanosine
  modified_base 74: mod_base = OTHER; note = 2'-Omethylcytosine
  modified_base 75: mod_base = OTHER; note = 2'-Omethyluridine
  modified_base 76: mod_base = OTHER; note = 2'-Omethylcytosine
  modified_base 77: mod_base = OTHER; note = 2'-Omethyladenosine
  modified_base 82: mod_base = OTHER; note = 2'-Omethylguanosine

SEQ ID NO: 9037 - RNA, 76 nt, synthetic construct; identical to SEQ ID NO: 3295
  source 1..76: mol_type = other RNA
  modified_base 1: mod_base = OTHER; note = 2'-Omethylcytosine phosphorothiorate
  modified_base 2: mod_base = OTHER; note = 2'-Omethylcytosine
  modified_base 3: mod_base = OTHER; note = 2'-fluorouridine
  modified_base 4: mod_base = OTHER; note = 2'-fluorouridine phosphorothiorate
  modified_base 9: mod_base = OTHER; note = 2'-Omethyladenosine phosphorothiorate
  modified_base 10: mod_base = OTHER; note = 2'-fluoroguanosine phosphorothiorate
  modified_base 13: mod_base = OTHER; note = Cytosine phosphorothiorate
  modified_base 15: mod_base = OTHER; note = 2'-fluoroguanosine phosphorothiorate
  modified_base 23: mod_base = OTHER; note = 2'-fluoroadenosine
  modified_base 26: mod_base = OTHER; note = 2'-Omethylguanosine
  modified_base 30: mod_base = OTHER; note = 2'-fluoroguanosine
  modified_base 38: mod_base = OTHER; note = 2'-fluoroadenosine phosphorothiorate
  modified_base 48: mod_base = OTHER; note = 2'-Omethylcytosine
  modified_base 50: mod_base = OTHER; note = 2'-fluorocytosine
  modified_base 54: mod_base = OTHER; note = 2'-fluorouridine phosphorothiorate

SEQ ID NO: 9038 - RNA, 85 nt, synthetic construct; identical to SEQ ID NO: 3310
  source 1..85: mol_type = other RNA
  modified_base 1: mod_base = OTHER; note = 2'-Omethylcytosine phosphorothiorate
  modified_base 8: mod_base = OTHER; note = Guanosine phosphorothiorate
  modified_base 25: mod_base = OTHER; note = 2'-Omethylguanosine
  modified_base 53: mod_base = OTHER; note = 2'-fluorouridine
  modified_base 57: mod_base = OTHER; note = Cytosine phosphorothiorate
  modified_base 58: mod_base = OTHER; note = Guanosine phosphorothiorate
  modified_base 84: mod_base = OTHER; note = Cytosine phosphorothiorate

SEQ ID NO: 9039 - RNA, 73 nt, synthetic construct; identical to SEQ ID NO: 935
  source 1..73: mol_type = other RNA
  modified_base 1: mod_base = OTHER; note = 2'-Omethylguanosine phosphorothiorate
  modified_base 2: mod_base = OTHER; note = 2'-Omethylguanosine
  modified_base 64: mod_base = OTHER; note = Guanosine phosphorothiorate
  modified_base 65: mod_base = OTHER; note = 2'-fluoroguanosine

SEQ ID NO: 9040 - RNA, 76 nt, synthetic construct; identical to SEQ ID NO: 625
  source 1..76: mol_type = other RNA
  modified_base 4: mod_base = OTHER; note = 2'-fluorouridine
  modified_base 14: mod_base = OTHER; note = 2'-fluoroadenosine
  modified_base 15: mod_base = OTHER; note = 2'-Omethyladenosine phosphorothiorate
  modified_base 20: mod_base = OTHER; note = Uridine phosphorothiorate
  modified_base 21: mod_base = OTHER; note = Adenosine phosphorothiorate
  modified_base 22: mod_base = OTHER; note = 2'-fluoroguanosine phosphorothiorate
  modified_base 23: mod_base = OTHER; note = 2'-Omethylcytosine
  modified_base 24: mod_base = OTHER; note = Guanosine phosphorothiorate
  modified_base 26: mod_base = OTHER; note = Adenosine phosphorothiorate
  modified_base 27: mod_base = OTHER; note = 2'-Omethyluridine
  modified_base 28: mod_base = OTHER; note = 2'-fluorouridine
  modified_base 30: mod_base = OTHER; note = Guanosine phosphorothiorate
  modified_base 31: mod_base = OTHER; note = 2'-fluoroadenosine
  modified_base 34: mod_base = OTHER; note = 2'-Omethyluridine
  modified_base 39: mod_base = OTHER; note = 2'-Omethyluridine
  modified_base 40: mod_base = OTHER; note = 2'-Omethyluridine
  modified_base 42: mod_base = OTHER; note = 2'-fluoroadenosine phosphorothiorate
  modified_base 43: mod_base = OTHER; note = 2'-fluoroadenosine
  modified_base 45: mod_base = OTHER; note = Guanosine phosphorothiorate
  modified_base 46: mod_base = OTHER; note = 2'-fluoroguanosine
  modified_base 51: mod_base = OTHER; note = Guanosine phosphorothiorate
  modified_base 52: mod_base = OTHER; note = 2'-Omethylguanosine
  modified_base 53: mod_base = OTHER; note = 2'-fluoroguanosine phosphorothiorate
  modified_base 54: mod_base = OTHER; note = 2'-fluorouridine
  modified_base 55: mod_base = OTHER; note = Uridine phosphorothiorate
  modified_base 57: mod_base = OTHER; note = 2'-Omethylguanosine phosphorothiorate
  modified_base 58: mod_base = OTHER; note = 2'-fluoroadenosine
  modified_base 59: mod_base = OTHER; note = 2'-Omethylguanosine
  modified_base 63: mod_base = OTHER; note = Cytosine phosphorothiorate
  modified_base 64: mod_base = OTHER; note = 2'-Omethylguanosine
  modified_base 66: mod_base = OTHER; note = Cytosine phosphorothiorate
  modified_base 67: mod_base = OTHER; note = 2'-fluoroguanosine
  modified_base 71: mod_base = OTHER; note = 2'-Omethyluridine
  modified_base 73: mod_base = OTHER; note = 2'-Omethylguanosine
  modified_base 74: mod_base = OTHER; note = 2'-Omethylcytosine
  modified_base 76: mod_base = OTHER; note = 2'-Omethyladenosine

SEQ ID NO: 9041 - RNA, 76 nt, synthetic construct; identical to SEQ ID NO: 625
  source 1..76: mol_type = other RNA
  modified_base 1: mod_base = OTHER; note = 2'-fluoroguanosine
  modified_base 2: mod_base = OTHER; note = 2'-fluoroguanosine
  modified_base 3: mod_base = OTHER; note = 2'-Omethylcytosine
  modified_base 6: mod_base = OTHER; note = Cytosine phosphorothiorate
  modified_base 8: mod_base = OTHER; note = Uridine phosphorothiorate
  modified_base 10: mod_base = OTHER; note = 2'-Omethylguanosine
  modified_base 11: mod_base = OTHER; note = 2'-Omethylcytosine
  modified_base 18: mod_base = OTHER; note = Guanosine phosphorothiorate
  modified_base 20: mod_base = OTHER; note = 2'-Omethyluridine
  modified_base 22: mod_base = OTHER; note = 2'-fluoroguanosine
  modified_base 23: mod_base = OTHER; note = 2'-Omethylcytosine
  modified_base 24: mod_base = OTHER; note = Guanosine phosphorothiorate
  modified_base 25: mod_base = OTHER; note = 2'-fluorocytosine
  modified_base 26: mod_base = OTHER; note = 2'-fluoroadenosine
  modified_base 27: mod_base = OTHER; note = Uridine phosphorothiorate
  modified_base 29: mod_base = OTHER; note = 2'-fluoroguanosine
  modified_base 33: mod_base = OTHER; note = Uridine phosphorothiorate
  modified_base 34: mod_base = OTHER; note = 2'-fluorouridine
  modified_base 36: mod_base = OTHER; note = Adenosine phosphorothiorate
  modified_base 41: mod_base = OTHER; note = 2'-Omethylcytosine phosphorothiorate
  modified_base 42: mod_base = OTHER; note = Adenosine phosphorothiorate
  modified_base 43: mod_base = OTHER; note = 2'-fluoroadenosine
  modified_base 44: mod_base = OTHER; note = 2'-fluoroadenosine
  modified_base 47: mod_base = OTHER; note = Uridine phosphorothiorate
  modified_base 49: mod_base = OTHER; note = Cytosine phosphorothiorate
  modified_base 50: mod_base = OTHER; note = 2'-Omethylcytosine phosphorothiorate
  modified_base 51: mod_base = OTHER; note = 2'-Omethylguanosine
  modified_base 52: mod_base = OTHER; note = 2'-fluoroguanosine
  modified_base 61: mod_base = OTHER; note = 2'-Omethylcytosine
  modified_base 62: mod_base = OTHER; note = 2'-fluorocytosine
  modified_base 65: mod_base = OTHER; note = 2'-Omethylguanosine
  modified_base 67: mod_base = OTHER; note = 2'-Omethylguanosine
  modified_base 72: mod_base = OTHER; note = Cytosine phosphorothiorate
  modified_base 73: mod_base = OTHER; note = 2'-fluoroguanosine phosphorothiorate
  modified_base 74: mod_base = OTHER; note = 2'-fluorocytosine

SEQ ID NO: 9042 - RNA, 86 nt, synthetic construct; identical to SEQ ID NO: 3290
  source 1..86: mol_type = other RNA
  modified_base 1: mod_base = OTHER; note = Adenosine phosphorothiorate
  modified_base 2: mod_base = OTHER; note = Cytosine phosphorothiorate
  modified_base 3: mod_base = OTHER; note = Cytosine phosphorothiorate
  modified_base 60: mod_base = OTHER; note = Uridine phosphorothiorate
  modified_base 61: mod_base = OTHER; note = Guanosine phosphorothiorate
  modified_base 73: mod_base = OTHER; note = Cytosine phosphorothiorate
  modified_base 74: mod_base = OTHER; note = Adenosine phosphorothiorate
  modified_base 75: mod_base = OTHER; note = Cytosine phosphorothiorate
  modified_base 76: mod_base = OTHER; note = Uridine phosphorothiorate
  modified_base 77: mod_base = OTHER; note = Cytosine phosphorothiorate
  modified_base 79: mod_base = OTHER; note = Uridine phosphorothiorate
  modified_base 80: mod_base = OTHER; note = Guanosine phosphorothiorate
  modified_base 84: mod_base = OTHER; note = Cytosine phosphorothiorate
  modified_base 85: mod_base = OTHER; note = Cytosine phosphorothiorate

SEQ ID NO: 9043 - DNA, 76 bp, synthetic construct; identical to SEQ ID NO: 1924
  source 1..76: mol_type = other DNA
  modified_base 1: mod_base = OTHER; note = 2'-Omethylguanosine phosphorothiorate
  modified_base 2: mod_base = OTHER; note = 2'-Omethylguanosine
  modified_base 3: mod_base = OTHER; note = 2'-Omethylcytosine
  modified_base 4: mod_base = OTHER; note = 2'-Omethyluridine
  modified_base 5: mod_base = OTHER; note = 2'-Omethylcytosine
  modified_base 6: mod_base = OTHER; note = 2'-Omethylcytosine
  modified_base 9: mod_base = OTHER; note = Guanosine phosphorothiorate
  modified_base 12: mod_base = OTHER; note = 2'-Omethylguanosine
  modified_base 13: mod_base = OTHER; note = 2'-Omethylcytosine
  modified_base 14: mod_base = OTHER; note = 2'-Omethyladenosine
  modified_base 15: mod_base = OTHER; note = 2'-fluoroadenosine
  modified_base 16: mod_base = OTHER; note = 2'-Omethyluridine
  modified_base 17: mod_base = OTHER; note = 2'-Omethylguanosine
  modified_base 18: mod_base = OTHER; note = 2'-Omethylguanosine
  modified_base 19: mod_base = OTHER; note = 2'-fluoroadenosine
  modified_base 20: mod_base = OTHER; note = 2'-Omethyluridine
  modified_base 21: mod_base = OTHER; note = 2'-fluoroadenosine
  modified_base 22: mod_base = OTHER; note = 2'-Omethylguanosine
  modified_base 23: mod_base = OTHER; note = 2'-Omethylcytosine
  modified_base 24: mod_base = OTHER; note = 2'-Omethylguanosine
  modified_base 25: mod_base = OTHER; note = 2'-Omethylcytosine
  modified_base 29: mod_base = OTHER; note = 2'-Omethylguanosine
  modified_base 33: mod_base = OTHER; note = 2'-fluorouridine
  modified_base 35: mod_base = OTHER; note = Cytosine phosphorothiorate
  modified_base 37: mod_base = OTHER; note = Adenosine phosphorothiorate
  modified_base 38: mod_base = OTHER; note = Adenosine phosphorothiorate
  modified_base 41: mod_base = OTHER; note = 2'-fluorocytosine phosphorothiorate
  modified_base 43: mod_base = OTHER; note = 2'-Omethyladenosine
  modified_base 44: mod_base = OTHER; note = 2'-fluoroadenosine
  modified_base 46: mod_base = OTHER; note = Guanosine phosphorothiorate
  modified_base 49: mod_base = OTHER; note = 2'-Omethylcytosine
  modified_base 50: mod_base = OTHER; note = 2'-Omethylcytosine
  modified_base 51: mod_base = OTHER; note = 2'-Omethylguanosine
  modified_base 52: mod_base = OTHER; note = 2'-Omethylguanosine
  modified_base 53: mod_base = OTHER; note = 2'-Omethylguanosine
  modified_base 54: mod_base = OTHER; note = 2'-Omethyluridine
  modified_base 55: mod_base = OTHER; note = Uridine phosphorothiorate
  modified_base 56: mod_base = OTHER; note = 2'-Omethylcytosine
  modified_base 57: mod_base = OTHER; note = 2'-O-(2-Methoxyethyl) guanosine
  modified_base 59: mod_base = OTHER; note = 2'-Omethylguanosine
  modified_base 61: mod_base = OTHER; note = 2'-Omethylcytosine
  modified_base 62: mod_base = OTHER; note = 2'-Omethylcytosine
  modified_base 63: mod_base = OTHER; note = 2'-fluorocytosine
  modified_base 64: mod_base = OTHER; note = 2'-Omethylguanosine
  modified_base 65: mod_base = OTHER; note = 2'-Omethylguanosine
  modified_base 66: mod_base = OTHER; note = 2'-Omethylcytosine
  modified_base 67: mod_base = OTHER; note = 2'-Omethylguanosine
  modified_base 68: mod_base = OTHER; note = 2'-Omethylguanosine
  modified_base 69: mod_base = OTHER; note = 2'-fluoroadenosine
  modified_base 71: mod_base = OTHER; note = 2'-Omethyluridine
  modified_base 73: mod_base = OTHER; note = 2'-Omethylguanosine
  modified_base 74: mod_base = OTHER; note = Cytosine phosphorothiorate
  modified_base 75: mod_base = OTHER; note = 2'-fluorocytosine phosphorothiorate
  misc_feature 1..9: note = RNA
  misc_feature 10: note = DNA
  misc_feature 11..76: note = RNA

SEQ ID NO: 9044 - RNA, 76 nt, synthetic construct; identical to SEQ ID NO: 625
  source 1..76: mol_type = other RNA
  modified_base 1: mod_base = OTHER; note = 2'-Omethylguanosine phosphorothiorate
  modified_base 2: mod_base = OTHER; note = 2'-Omethylguanosine
  modified_base 3: mod_base = OTHER; note = 2'-Omethylcytosine
  modified_base 4: mod_base = OTHER; note = 2'-Omethyluridine
  modified_base 5: mod_base = OTHER; note = 2'-Omethylcytosine
  modified_base 6: mod_base = OTHER; note = 2'-Omethylcytosine
  modified_base 10: mod_base = OTHER; note = 2'-Omethylguanosine
  modified_base 11: mod_base = OTHER; note = 2'-Omethylcytosine
  modified_base 12: mod_base = OTHER; note = Guanosine phosphorothiorate
  modified_base 13: mod_base = OTHER; note = 2'-fluorocytosine
  modified_base 14: mod_base = OTHER; note = 2'-Omethyladenosine
  modified_base 15: mod_base = OTHER; note = 2'-fluoroadenosine
  modified_base 16: mod_base = OTHER; note = 2'-Omethyluridine
  modified_base 17: mod_base = OTHER; note = 2'-Omethylguanosine
  modified_base 18: mod_base = OTHER; note = 2'-Omethylguanosine
  modified_base 19: mod_base = OTHER; note = 2'-fluoroadenosine
  modified_base 20: mod_base = OTHER; note = 2'-Omethyluridine
  modified_base 21: mod_base = OTHER; note = 2'-fluoroadenosine
  modified_base 22: mod_base = OTHER; note = 2'-Omethylguanosine
  modified_base 23: mod_base = OTHER; note = 2'-Omethylcytosine
  modified_base 24: mod_base = OTHER; note = 2'-Omethylguanosine
  modified_base 25: mod_base = OTHER; note = Cytosine phosphorothiorate
  modified_base 33: mod_base = OTHER; note = 2'-fluorouridine
  modified_base 35: mod_base = OTHER; note = Cytosine phosphorothiorate
  modified_base 37: mod_base = OTHER; note = Adenosine phosphorothiorate
  modified_base 38: mod_base = OTHER; note = Adenosine phosphorothiorate
  modified_base 44: mod_base = OTHER; note = Adenosine phosphorothiorate
  modified_base 45: mod_base = OTHER; note = 2'-O-(2-Methoxyethyl) guanosine
  modified_base 46: mod_base = OTHER; note = 2'-fluoroguanosine
  modified_base 48: mod_base = OTHER; note = 2'-fluorouridine
  modified_base 49: mod_base = OTHER; note = 2'-Omethylcytosine
  modified_base 50: mod_base = OTHER; note = 2'-Omethylcytosine
  modified_base 51: mod_base = OTHER; note = Guanosine phosphorothiorate
  modified_base 52: mod_base = OTHER; note = 2'-Omethylguanosine
  modified_base 53: mod_base = OTHER; note = 2'-Omethylguanosine
  modified_base 56: mod_base = OTHER; note = 2'-Omethylcytosine
  modified_base 61: mod_base = OTHER; note = 2'-Omethylcytosine
  modified_base 62: mod_base = OTHER; note = 2'-Omethylcytosine
  modified_base 63: mod_base = OTHER; note = 2'-fluorocytosine
  modified_base 64: mod_base = OTHER; note = 2'-Omethylguanosine
  modified_base 65: mod_base = OTHER; note = 2'-Omethylguanosine
  modified_base 66: mod_base = OTHER; note = 2'-Omethylcytosine
  modified_base 67: mod_base = OTHER; note = 2'-Omethylguanosine
  modified_base 68: mod_base = OTHER; note = 2'-Omethylguanosine
  modified_base 69: mod_base = OTHER; note = 2'-fluoroadenosine
  modified_base 71: mod_base = OTHER; note = 2'-Omethyluridine
  modified_base 73: mod_base = OTHER; note = 2'-Omethylguanosine
  modified_base 75: mod_base = OTHER; note = 2'-fluorocytosine phosphorothiorate

SEQ ID NO: 9045 - DNA, 74 bp, synthetic construct; identical to SEQ ID NO: 3384
  source 1..74: mol_type = other DNA
  modified_base 1: mod_base = OTHER; note = 2'-Omethylguanosine phosphorothiorate
  modified_base 2: mod_base = OTHER; note = 2'-Omethylguanosine phosphorothiorate
  modified_base 19: mod_base = OTHER; note = Adenosine phosphorothiorate
  modified_base 29: mod_base = OTHER; note = 2'-O-(2-Methoxyethyl) guanosine
  modified_base 68: mod_base = OTHER; note = 2'-fluoroguanosine
  modified_base 72: mod_base = OTHER; note = 2'-fluorocytosine
  modified_base 73: mod_base = OTHER; note = 2'-Omethylguanosine
  misc_feature 1..19: note = RNA
  misc_feature 20: note = DNA
  misc_feature 21..43: note = RNA
  misc_feature 44: note = DNA
  misc_feature 45..74: note = RNA

SEQ ID NO: 9046 - RNA, 85 nt, synthetic construct; identical to SEQ ID NO: 3297
  source 1..85: mol_type = other RNA
  modified_base 1: mod_base = OTHER; note = 2'-Omethylguanosine
  modified_base 19: mod_base = OTHER; note = 2'-fluorouridine
  modified_base 20: mod_base = OTHER; note = 2'-Omethyluridine
  modified_base 21: mod_base = OTHER; note = 2'-Omethyladenosine
  modified_base 22: mod_base = OTHER; note = 2'-Omethyladenosine
  modified_base 40: mod_base = OTHER; note = 2'-fluorocytosine
  modified_base 41: mod_base = OTHER; note = 2'-Omethylcytosine
  modified_base 42: mod_base = OTHER; note = 2'-Omethyladenosine
  modified_base 43: mod_base = OTHER; note = 2'-Omethyladenosine
  modified_base 82: mod_base = OTHER; note = 2'-Omethylguanosine

SEQ ID NO: 9047 - RNA, 75 nt, synthetic construct; identical to SEQ ID NO: 3299
  source 1..75: mol_type = other RNA
  modified_base 16: mod_base = OTHER; note = 2'-Omethylcytosine phosphorothiorate
  modified_base 37: mod_base = OTHER; note = 2'-fluoroadenosine
  modified_base 39: mod_base = OTHER; note = 2'-fluorocytosine
  modified_base 49: mod_base = OTHER; note = 2'-fluoroadenosine phosphorothiorate
  modified_base 67: mod_base = OTHER; note = 2'-fluorocytosine phosphorothiorate
  modified_base 73: mod_base = OTHER; note = Cytosine phosphorothiorate

SEQ ID NO: 9048 - RNA, 75 nt, synthetic construct; identical to SEQ ID NO: 1045
  source 1..75: mol_type = other RNA
  modified_base 1: mod_base = OTHER; note = 2'-Omethylguanosine phosphorothiorate
  modified_base 2: mod_base = OTHER; note = 2'-Omethylguanosine phosphorothiorate
  modified_base 14: mod_base = OTHER; note = 2'-Omethyladenosine
  modified_base 17: mod_base = OTHER; note = 2'-Omethylguanosine
  modified_base 18: mod_base = OTHER; note = 2'-Omethylguanosine
  modified_base 20: mod_base = OTHER; note = 2'-Omethyladenosine phosphorothiorate
  modified_base 22: mod_base = OTHER; note = 2'-Omethylguanosine
  modified_base 25: mod_base = OTHER; note = 2'-Omethylcytosine
  modified_base 27: mod_base = OTHER; note = 2'-Omethylcytosine
  modified_base 33: mod_base = OTHER; note = 2'-fluorouridine
  modified_base 41: mod_base = OTHER; note = 2'-Omethylcytosine phosphorothiorate
  modified_base 44: mod_base = OTHER; note = 2'-Omethylcytosine phosphorothiorate
  modified_base 45: mod_base = OTHER; note = 2'-Omethylguanosine
  modified_base 46: mod_base = OTHER; note = 2'-fluoroadenosine
  modified_base 47: mod_base = OTHER; note = 2'-fluorouridine
  modified_base 51: mod_base = OTHER; note = 2'-Omethyladenosine
  modified_base 54: mod_base = OTHER; note = Uridine phosphorothiorate
  modified_base 70: mod_base = OTHER; note = 2'-Omethylcytosine
  modified_base 72: mod_base = OTHER; note = 2'-Omethyluridine

SEQ ID NO: 9049 - RNA, 85 nt, synthetic construct; identical to SEQ ID NO: 3301
  source 1..85: mol_type = other RNA
  modified_base 1: mod_base = OTHER; note = 2'-Omethylguanosine phosphorothiorate
  modified_base 2: mod_base = OTHER; note = 2'-fluorocytosine phosphorothiorate
  modified_base 3: mod_base = OTHER; note = 2'-Omethyluridine phosphorothiorate
  modified_base 4: mod_base = OTHER; note = 2'-Omethylguanosine phosphorothiorate
  modified_base 12: mod_base = OTHER; note = Cytosine phosphorothiorate
  modified_base 14: mod_base = OTHER; note = 2'-Omethyladenosine phosphorothiorate
  modified_base 18: mod_base = OTHER; note = 2'-Omethylguanosine phosphorothiorate
  modified_base 25: mod_base = OTHER; note = 2'-Omethylcytosine
  modified_base 29: mod_base = OTHER; note = 2'-fluoroguanosine
  modified_base 34: mod_base = OTHER; note = 2'-fluorouridine
  modified_base 46: mod_base = OTHER; note = 2'-fluoroguanosine
  modified_base 47: mod_base = OTHER; note = Guanosine phosphorothiorate
  modified_base 50: mod_base = OTHER; note = Cytosine phosphorothiorate
  modified_base 54: mod_base = OTHER; note = 2'-fluorocytosine
  modified_base 55: mod_base = OTHER; note = 2'-fluorocytosine phosphorothiorate
  modified_base 59: mod_base = OTHER; note = 2'-Omethylcytosine
  modified_base 61: mod_base = OTHER; note = 2'-Omethylguanosine
  modified_base 72: mod_base = OTHER; note = 2'-fluorouridine phosphorothiorate
  modified_base 73: mod_base = OTHER; note = 2'-fluoroguanosine phosphorothiorate
  modified_base 83: mod_base = OTHER; note = 2'-fluorocytosine phosphorothiorate

SEQ ID NO: 9050 - RNA, 74 nt, synthetic construct; identical to SEQ ID NO: 3293
  source 1..74: mol_type = other RNA
  modified_base 3: mod_base = OTHER; note = 2'-Omethylcytosine
  modified_base 4: mod_base = OTHER; note = Uridine phosphorothiorate
  modified_base 6: mod_base = OTHER; note = 2'-fluoroguanosine
  modified_base 8: mod_base = OTHER; note = Guanosine phosphorothiorate
  modified_base 26: mod_base = OTHER; note = 2'-Omethylcytosine
  modified_base 37: mod_base = OTHER; note = 2'-fluorouridine
  modified_base 44: mod_base = OTHER; note = Guanosine phosphorothiorate
  modified_base 51: mod_base = OTHER; note = Guanosine phosphorothiorate
  modified_base 55: mod_base = OTHER; note = 2'-Omethyladenosine
  modified_base 62: mod_base = OTHER; note = 2'-fluoroguanosine
  modified_base 73: mod_base = OTHER; note = 2'-Omethylcytosine phosphorothiorate

SEQ ID NO: 9051 - RNA, 76 nt, synthetic construct; identical to SEQ ID NO: 3318
  source 1..76: mol_type = other RNA
  modified_base 1: mod_base = OTHER; note = 2'-Omethylcytosine
  modified_base 2: mod_base = OTHER; note = 2'-Omethylcytosine
  modified_base 3: mod_base = OTHER; note = 2'-Omethyluridine
  modified_base 4: mod_base = OTHER; note = 2'-Omethyluridine
  modified_base 5: mod_base = OTHER; note = 2'-Omethylcytosine
  modified_base 6: mod_base = OTHER; note = 2'-Omethylguanosine
  modified_base 33: mod_base = OTHER; note = 2'-fluorouridine
  modified_base 41: mod_base = OTHER; note = 2'-Omethylcytosine
  modified_base 44: mod_base = OTHER; note = 2'-Omethyladenosine
  modified_base 45: mod_base = OTHER; note = 2'-Omethylguanosine
  modified_base 46: mod_base = OTHER; note = 2'-fluoroguanosine
  modified_base 47: mod_base = OTHER; note = 2'-fluorouridine
  modified_base 48: mod_base = OTHER; note = 2'-fluorocytosine
  modified_base 52: mod_base = OTHER; note = 2'-Omethylguanosine
  modified_base 55: mod_base = OTHER; note = Uridine phosphorothiorate
  modified_base 71: mod_base = OTHER; note = 2'-Omethylguanosine
  modified_base 73: mod_base = OTHER; note = 2'-Omethyladenosine

SEQ ID NO: 9052 - RNA, 76 nt, synthetic construct; identical to SEQ ID NO: 625
  source 1..76: mol_type = other RNA
  modified_base 1: mod_base = OTHER; note = 2'-Omethylguanosine phosphorothiorate
  modified_base 2: mod_base = OTHER; note = 2'-Omethylguanosine
  modified_base 3: mod_base = OTHER; note = 2'-Omethylcytosine
  modified_base 4: mod_base = OTHER; note = 2'-Omethyluridine
  modified_base 5: mod_base = OTHER; note = 2'-Omethylcytosine
  modified_base 6: mod_base = OTHER; note = 2'-Omethylcytosine
  modified_base 10: mod_base = OTHER; note = 2'-Omethylguanosine
  modified_base 11: mod_base = OTHER; note = 2'-Omethylcytosine
  modified_base 12: mod_base = OTHER; note = 2'-Omethylguanosine
  modified_base 13: mod_base = OTHER; note = 2'-Omethylcytosine
  modified_base 14: mod_base = OTHER; note = 2'-Omethyladenosine
  modified_base 15: mod_base = OTHER; note = 2'-Omethyladenosine
  modified_base 16: mod_base = OTHER; note = 2'-Omethyluridine
  modified_base 17: mod_base = OTHER; note = 2'-Omethylguanosine
  modified_base 18: mod_base = OTHER; note = 2'-Omethylguanosine
  modified_base 19: mod_base = OTHER; note = 2'-Omethyladenosine
  modified_base 20: mod_base = OTHER; note = 2'-Omethyluridine
  modified_base 40: mod_base = OTHER; note = 2'-fluorouridine
  modified_base 41: mod_base = OTHER; note = 2'-fluorocytosine
  modified_base 42: mod_base = OTHER; note = 2'-fluoroadenosine
  modified_base 43: mod_base = OTHER; note = 2'-fluoroadenosine
  modified_base 49: mod_base = OTHER; note = 2'-Omethylcytosine
  modified_base 50: mod_base = OTHER; note = 2'-Omethylcytosine
  modified_base 51: mod_base = OTHER; note = 2'-Omethylguanosine
  modified_base 52: mod_base = OTHER; note = 2'-Omethylguanosine
  modified_base 53: mod_base = OTHER; note = 2'-Omethylguanosine
  modified_base 54: mod_base = OTHER; note = Uridine phosphorothiorate
  modified_base 55: mod_base = OTHER; note = Uridine phosphorothiorate
  modified_base 56: mod_base = OTHER; note = Cytosine phosphorothiorate
  modified_base 57: mod_base = OTHER; note = Guanosine phosphorothiorate
  modified_base 61: mod_base = OTHER; note = 2'-Omethylcytosine
  modified_base 62: mod_base = OTHER; note = 2'-Omethylcytosine
  modified_base 63: mod_base = OTHER; note = 2'-fluorocytosine
  modified_base 64: mod_base = OTHER; note = 2'-Omethylguanosine
  modified_base 65: mod_base = OTHER; note = 2'-Omethylguanosine
  modified_base 66: mod_base = OTHER; note = 2'-Omethylcytosine
  modified_base 67: mod_base = OTHER; note = 2'-Omethylguanosine
  modified_base 68: mod_base = OTHER; note = 2'-Omethylguanosine
  modified_base 69: mod_base = OTHER; note = 2'-Omethyladenosine
  modified_base 71: mod_base = OTHER; note = 2'-Omethyluridine
  modified_base 72: mod_base = OTHER; note = 2'-Omethylcytosine

SEQ ID NO: 9053 - RNA, 75 nt, synthetic construct; identical to SEQ ID NO: 1045
  source 1..75: mol_type = other RNA
  modified_base 1: mod_base = OTHER; note = 2'-Omethylguanosine phosphorothiorate
  modified_base 21: mod_base = OTHER; note = 2'-Omethyladenosine phosphorothiorate
  modified_base 24: mod_base = OTHER; note = Adenosine phosphorothiorate
  modified_base 25: mod_base = OTHER; note = 2'-fluorocytosine
  modified_base 48: mod_base = OTHER; note = 2'-fluorocytosine
  modified_base 57: mod_base = OTHER; note = 2'-fluoroadenosine phosphorothiorate
  modified_base 73: mod_base = OTHER; note = Cytosine phosphorothiorate

SEQ ID NO: 9054 - RNA, 86 nt, synthetic construct; identical to SEQ ID NO: 3290
  source 1..86: mol_type = other RNA
  modified_base 1: mod_base = OTHER; note = 2'-Omethyladenosine
  modified_base 2: mod_base = OTHER; note = 2'-Omethylcytosine
  modified_base 3: mod_base = OTHER; note = 2'-Omethylcytosine
  modified_base 4: mod_base = OTHER; note = 2'-Omethyladenosine
  modified_base 5: mod_base = OTHER; note = 2'-Omethylguanosine
  modified_base 6: mod_base = OTHER; note = 2'-Omethylguanosine
  modified_base 10: mod_base = OTHER; note = 2'-Omethylguanosine
  modified_base 11: mod_base = OTHER; note = 2'-Omethylcytosine
  modified_base 12: mod_base = OTHER; note = 2'-Omethylcytosine
  modified_base 13: mod_base = OTHER; note = 2'-Omethylguanosine

SEQ ID NO: 9055 - RNA, 85 nt, synthetic construct; identical to SEQ ID NO: 3286
  source 1..85: mol_type = other RNA
  modified_base 1: mod_base = OTHER; note = 2'-fluorocytosine phosphorothiorate
  modified_base 11: mod_base = OTHER; note = Cytosine phosphorothiorate
  modified_base 16: mod_base = OTHER; note = 2'-Omethylguanosine
  modified_base 32: mod_base = OTHER; note = 2'-fluorouridine
  modified_base 43: mod_base = OTHER; note = 2'-Omethyluridine
  modified_base 56: mod_base = OTHER; note = 2'-Omethylguanosine
  modified_base 67: mod_base = OTHER; note = Adenosine phosphorothiorate

SEQ ID NO: 9056 - RNA, 75 nt, synthetic construct; identical to SEQ ID NO: 1045
  source 1..75: mol_type = other RNA
  modified_base 1: mod_base = OTHER; note = 2'-Omethylguanosine phosphorothiorate
  modified_base 2: mod_base = OTHER; note = 2'-Omethylguanosine
  modified_base 4: mod_base = OTHER; note = 2'-fluorouridine phosphorothiorate
  modified_base 9: mod_base = OTHER; note = 2'-fluoroguanosine
  modified_base 10: mod_base = OTHER; note = 2'-fluoroguanosine phosphorothiorate
  modified_base 22: mod_base = OTHER; note = Guanosine phosphorothiorate
  modified_base 26: mod_base = OTHER; note = 2'-Omethyluridine
  modified_base 28: mod_base = OTHER; note = 2'-fluorouridine
  modified_base 36: mod_base = OTHER; note = 2'-fluoroadenosine phosphorothiorate
  modified_base 46: mod_base = OTHER; note = 2'-fluoroadenosine
  modified_base 56: mod_base = OTHER; note = 2'-Omethylguanosine
  modified_base 62: mod_base = OTHER; note = Cytosine phosphorothiorate
  modified_base 63: mod_base = OTHER; note = 2'-fluoroguanosine
  modified_base 66: mod_base = OTHER; note = Guanosine phosphorothiorate
  modified_base 71: mod_base = OTHER; note = 2'-fluorocytosine phosphorothiorate

SEQ ID NO: 9057 - RNA, 76 nt, synthetic construct; identical to SEQ ID NO: 625
  source 1..76: mol_type = other RNA
  modified_base 5: mod_base = OTHER; note = 2'-Omethylcytosine
  modified_base 6: mod_base = OTHER; note = 2'-Omethylcytosine phosphorothiorate
  modified_base 7: mod_base = OTHER; note = Guanosine phosphorothiorate
  modified_base 11: mod_base = OTHER; note = Cytosine phosphorothiorate
  modified_base 15: mod_base = OTHER; note = 2'-fluoroadenosine
  modified_base 17: mod_base = OTHER; note = Guanosine phosphorothiorate
  modified_base 18: mod_base = OTHER; note = 2'-fluoroguanosine
  modified_base 22: mod_base = OTHER; note = 2'-Omethylguanosine
  modified_base 24: mod_base = OTHER; note = 2'-Omethylguanosine
  modified_base 25: mod_base = OTHER; note = 2'-Omethylcytosine
  modified_base 27: mod_base = OTHER; note = 2'-fluorouridine
  modified_base 30: mod_base = OTHER; note = 2'-Omethylguanosine
  modified_base 31: mod_base = OTHER; note = 2'-Omethyladenosine
  modified_base 32: mod_base = OTHER; note = 2'-fluorocytosine
  modified_base 37: mod_base = OTHER; note = Adenosine phosphorothiorate
  modified_base 38: mod_base = OTHER; note = 2'-fluoroadenosine
  modified_base 43: mod_base = OTHER; note = Adenosine phosphorothiorate
  modified_base 46: mod_base = OTHER; note = 2'-fluoroguanosine
  modified_base 47: mod_base = OTHER; note = 2'-Omethyluridine phosphorothiorate
  modified_base 48: mod_base = OTHER; note = 2'-Omethyluridine
  modified_base 50: mod_base = OTHER; note = 2'-fluorocytosine
  modified_base 51: mod_base = OTHER; note = 2'-Omethylguanosine
  modified_base 52: mod_base = OTHER; note = 2'-Omethylguanosine
  modified_base 56: mod_base = OTHER; note = 2'-Omethylcytosine
  modified_base 57: mod_base = OTHER; note = 2'-fluoroguanosine
  modified_base 61: mod_base = OTHER; note = 2'-Omethylcytosine
  modified_base 62: mod_base = OTHER; note = 2'-fluorocytosine
  modified_base 63: mod_base = OTHER; note = 2'-fluorocytosine
  modified_base 67: mod_base = OTHER; note = 2'-Omethylguanosine
  modified_base 68: mod_base = OTHER; note = Guanosine phosphorothiorate
  modified_base 70: mod_base = OTHER; note = 2'-fluoroguanosine phosphorothiorate
  modified_base 73: mod_base = OTHER; note = 2'-Omethylguanosine phosphorothiorate
  modified_base 74: mod_base = OTHER; note = Cytosine phosphorothiorate
  modified_base 75: mod_base = OTHER; note = 2'-fluorocytosine
  modified_base 76: mod_base = OTHER; note = 2'-fluoroadenosine

SEQ ID NO: 9058 - RNA, 76 nt, synthetic construct; identical to SEQ ID NO: 3447
  source 1..76: mol_type = other RNA
  modified_base 1: mod_base = OTHER; note = 2'-Omethylguanosine phosphorothiorate
  modified_base 2: mod_base = OTHER; note = 2'-Omethylcytosine
  modified_base 3: mod_base = OTHER; note = 2'-Omethylcytosine
  modified_base 4: mod_base = OTHER; note = 2'-Omethylcytosine
  modified_base 5: mod_base = OTHER; note = 2'-Omethylguanosine
  modified_base 6: mod_base = OTHER; note = 2'-Omethyladenosine
  modified_base 27: mod_base = OTHER; note = 2'-Omethyluridine
  modified_base 28: mod_base = OTHER; note = 2'-Omethyluridine
  modified_base 29: mod_base = OTHER; note = 2'-fluoroguanosine
  modified_base 30: mod_base = OTHER; note = 2'-Omethylguanosine
  modified_base 40: mod_base = OTHER; note = 2'-fluorouridine
  modified_base 41: mod_base = OTHER; note = 2'-Omethylcytosine
  modified_base 42: mod_base = OTHER; note = 2'-Omethyladenosine
  modified_base 43: mod_base = OTHER; note = 2'-Omethyladenosine
  modified_base 73: mod_base = OTHER; note = 2'-Omethylguanosine

SEQ ID NO: 9059 - RNA, 86 nt, synthetic construct; identical to SEQ ID NO: 3290
  source 1..86: mol_type = other RNA
  modified_base 35: mod_base = OTHER; note = Cytosine phosphorothiorate

SEQ ID NO: 9060 - RNA, 76 nt, synthetic construct; identical to SEQ ID NO: 3795
  source 1..76: mol_type = other RNA
  modified_base 1: mod_base = OTHER; note = 2'-Omethylguanosine
  modified_base 2: mod_base = OTHER; note = 2'-Omethylcytosine
  modified_base 3: mod_base = OTHER; note = 2'-Omethylcytosine
  modified_base 4: mod_base = OTHER; note = 2'-Omethyluridine
  modified_base 5: mod_base = OTHER; note = 2'-Omethylcytosine
  modified_base 6: mod_base = OTHER; note = 2'-Omethylcytosine
  modified_base 14: mod_base = OTHER; note = 2'-Omethyladenosine
  modified_base 17: mod_base = OTHER; note = 2'-Omethylguanosine
  modified_base 18: mod_base = OTHER; note = 2'-Omethylguanosine
  modified_base 20: mod_base = OTHER; note = 2'-Omethyluridine
  modified_base 22: mod_base = OTHER; note = 2'-Omethyladenosine
  modified_base 25: mod_base = OTHER; note = 2'-Omethylcytosine
  modified_base 27: mod_base = OTHER; note = 2'-Omethyluridine
  modified_base 33: mod_base = OTHER; note = 2'-fluorouridine
  modified_base 71: mod_base = OTHER; note = 2'-Omethylguanosine
  modified_base 73: mod_base = OTHER; note = 2'-Omethylguanosine

SEQ ID NO: 9061 - RNA, 76 nt, synthetic construct; identical to SEQ ID NO: 625
  source 1..76: mol_type = other RNA
  modified_base 1: mod_base = OTHER; note = 2'-Omethylguanosine
  modified_base 2: mod_base = OTHER; note = 2'-Omethylguanosine
  modified_base 3: mod_base = OTHER; note = 2'-Omethylcytosine
  modified_base 5: mod_base = OTHER; note = 2'-Omethylcytosine
  modified_base 12: mod_base = OTHER; note = 2'-fluoroguanosine
  modified_base 13: mod_base = OTHER; note = 2'-fluorocytosine
  modified_base 14: mod_base = OTHER; note = Adenosine phosphorothiorate
  modified_base 15: mod_base = OTHER; note = 2'-fluoroadenosine
  modified_base 16: mod_base = OTHER; note = 2'-Omethyluridine
  modified_base 20: mod_base = OTHER; note = 2'-Omethyluridine phosphorothiorate
  modified_base 25: mod_base = OTHER; note = Cytosine phosphorothiorate
  modified_base 26: mod_base = OTHER; note = 2'-fluoroadenosine phosphorothiorate
  modified_base 27: mod_base = OTHER; note = 2'-Omethyluridine
  modified_base 29: mod_base = OTHER; note = 2'-fluoroguanosine
  modified_base 32: mod_base = OTHER; note = 2'-fluorocytosine
  modified_base 33: mod_base = OTHER; note = 2'-fluorouridine
  modified_base 34: mod_base = OTHER; note = 2'-Omethyluridine
  modified_base 38: mod_base = OTHER; note = 2'-fluoroadenosine phosphorothiorate
  modified_base 40: mod_base = OTHER; note = 2'-Omethyluridine
  modified_base 44: mod_base = OTHER; note = 2'-fluoroadenosine
  modified_base 45: mod_base = OTHER; note = Guanosine phosphorothiorate
  modified_base 46: mod_base = OTHER; note = 2'-fluoroguanosine
  modified_base 51: mod_base = OTHER; note = 2'-Omethylguanosine phosphorothiorate
  modified_base 52: mod_base = OTHER; note = 2'-Omethylguanosine
  modified_base 60: mod_base = OTHER; note = 2'-Omethyluridine
  modified_base 63: mod_base = OTHER; note = 2'-Omethylcytosine
  modified_base 67: mod_base = OTHER; note = 2'-Omethylguanosine
  modified_base 68: mod_base = OTHER; note = 2'-Omethylguanosine
  modified_base 70: mod_base = OTHER; note = Guanosine phosphorothiorate
  modified_base 71: mod_base = OTHER; note = 2'-fluorouridine
  modified_base 72: mod_base = OTHER; note = Cytosine phosphorothiorate
  modified_base 73: mod_base = OTHER; note = 2'-Omethylguanosine

SEQ ID NO: 9062 - RNA, 76 nt, synthetic construct; identical to SEQ ID NO: 3318
  source 1..76: mol_type = other RNA
  modified_base 1: mod_base = OTHER; note = 2'-Omethylcytosine
  modified_base 2: mod_base = OTHER; note = 2'-Omethylcytosine
  modified_base 3: mod_base = OTHER; note = 2'-Omethyluridine
  modified_base 4: mod_base = OTHER; note = 2'-Omethyluridine
  modified_base 5: mod_base = OTHER; note = 2'-Omethylcytosine
  modified_base 6: mod_base = OTHER; note = 2'-Omethylguanosine
  modified_base 14: mod_base = OTHER; note = 2'-Omethyladenosine
  modified_base 15: mod_base = OTHER; note = 2'-fluoroguanosine
  modified_base 16: mod_base = OTHER; note = 2'-Omethyluridine
  modified_base 18: mod_base = OTHER; note = 2'-Omethylguanosine
  modified_base 19: mod_base = OTHER; note = 2'-Omethylguanosine
  modified_base 20: mod_base = OTHER; note = 2'-fluorouridine
  modified_base 25: mod_base = OTHER; note = 2'-Omethylcytosine
  modified_base 33: mod_base = OTHER; note = 2'-fluorouridine
  modified_base 35: mod_base = OTHER; note = Uridine phosphorothiorate
  modified_base 37: mod_base = OTHER; note = Guanosine phosphorothiorate
  modified_base 38: mod_base = OTHER; note = Adenosine phosphorothiorate
  modified_base 41: mod_base = OTHER; note = 2'-Omethylcytosine
  modified_base 42: mod_base = OTHER; note = 2'-Omethyluridine
  modified_base 43: mod_base = OTHER; note = 2'-Omethyluridine
  modified_base 44: mod_base = OTHER; note = 2'-Omethyladenosine
  modified_base 49: mod_base = OTHER; note = 2'-Omethylguanosine
  modified_base 50: mod_base = OTHER; note = 2'-Omethylcytosine
  modified_base 52: mod_base = OTHER; note = 2'-Omethylguanosine
  modified_base 54: mod_base = OTHER; note = 2'-Omethyluridine
  modified_base 55: mod_base = OTHER; note = Uridine phosphorothiorate
  modified_base 56: mod_base = OTHER; note = 2'-Omethylcytosine
  modified_base 57: mod_base = OTHER; note = 2'-fluoroguanosine
  modified_base 59: mod_base = OTHER; note = 2'-Omethyladenosine
  modified_base 61: mod_base = OTHER; note = 2'-Omethylcytosine
  modified_base 65: mod_base = OTHER; note = 2'-Omethylcytosine
  modified_base 73: mod_base = OTHER; note = 2'-Omethyladenosine

SEQ ID NO: 9063 - RNA, 76 nt, synthetic construct; identical to SEQ ID NO: 625
  source 1..76: mol_type = other RNA
  modified_base 1: mod_base = OTHER; note = 2'-Omethylguanosine
  modified_base 2: mod_base = OTHER; note = 2'-Omethylguanosine
  modified_base 3: mod_base = OTHER; note = 2'-Omethylcytosine
  modified_base 5: mod_base = OTHER; note = 2'-Omethylcytosine
  modified_base 6: mod_base = OTHER; note = 2'-Omethylcytosine
  modified_base 10: mod_base = OTHER; note = 2'-Omethylguanosine
  modified_base 13: mod_base = OTHER; note = 2'-Omethylcytosine
  modified_base 17: mod_base = OTHER; note = Guanosine phosphorothiorate
  modified_base 18: mod_base = OTHER; note = 2'-Omethylguanosine
  modified_base 19: mod_base = OTHER; note = Adenosine phosphorothiorate
  modified_base 20: mod_base = OTHER; note = 2'-Omethyluridine
  modified_base 25: mod_base = OTHER; note = 2'-Omethylcytosine
  modified_base 29: mod_base = OTHER; note = 2'-Omethylguanosine
  modified_base 33: mod_base = OTHER; note = 2'-fluorouridine
  modified_base 35: mod_base = OTHER; note = Cytosine phosphorothiorate
  modified_base 37: mod_base = OTHER; note = Adenosine phosphorothiorate
  modified_base 38: mod_base = OTHER; note = Adenosine phosphorothiorate
  modified_base 41: mod_base = OTHER; note = 2'-fluorocytosine phosphorothiorate
  modified_base 43: mod_base = OTHER; note = 2'-Omethyladenosine
  modified_base 44: mod_base = OTHER; note = 2'-fluoroadenosine
  modified_base 46: mod_base = OTHER; note = Guanosine phosphorothiorate
  modified_base 50: mod_base = OTHER; note = 2'-Omethylcytosine
  modified_base 52: mod_base = OTHER; note = 2'-Omethylguanosine
  modified_base 54: mod_base = OTHER; note = Uridine phosphorothiorate
  modified_base 55: mod_base = OTHER; note = Uridine phosphorothiorate
  modified_base 56: mod_base = OTHER; note = 2'-Omethylcytosine
  modified_base 57: mod_base = OTHER; note = Guanosine phosphorothiorate
  modified_base 62: mod_base = OTHER; note = 2'-Omethylcytosine
  modified_base 63: mod_base = OTHER; note = 2'-fluorocytosine
  modified_base 65: mod_base = OTHER; note = 2'-Omethylguanosine
  modified_base 71: mod_base = OTHER; note = 2'-Omethyluridine
  modified_base 73: mod_base = OTHER; note = 2'-Omethylguanosine

SEQ ID NO: 9064 - RNA, 76 nt, synthetic construct; identical to SEQ ID NO: 3289
  source 1..76: mol_type = other RNA
  modified_base 1: mod_base = OTHER; note = 2'-Omethylguanosine phosphorothiorate
  modified_base 2: mod_base = OTHER; note = 2'-Omethylcytosine phosphorothiorate
  modified_base 8: mod_base = OTHER; note = Uridine phosphorothiorate
  modified_base 14: mod_base = OTHER; note = Adenosine phosphorothiorate
  modified_base 19: mod_base = OTHER; note = Guanosine phosphorothiorate
  modified_base 22: mod_base = OTHER; note = Guanosine phosphorothiorate
  modified_base 25: mod_base = OTHER; note = Cytosine phosphorothiorate
  modified_base 27: mod_base = OTHER; note = Uridine phosphorothiorate
  modified_base 41: mod_base = OTHER; note = 2'-Omethyluridine phosphorothiorate
  modified_base 45: mod_base = OTHER; note = Guanosine phosphorothiorate
  modified_base 46: mod_base = OTHER; note = Guanosine phosphorothiorate
  modified_base 47: mod_base = OTHER; note = Uridine phosphorothiorate
  modified_base 48: mod_base = OTHER; note = 2'-fluorocytosine
  modified_base 49: mod_base = OTHER; note = Cytosine phosphorothiorate
  modified_base 71: mod_base = OTHER; note = Guanosine phosphorothiorate
  modified_base 73: mod_base = OTHER; note = 2'-Omethylguanosine phosphorothiorate

SEQ ID NO: 9065 - RNA, 76 nt, synthetic construct; identical to SEQ ID NO: 3332
  source 1..76: mol_type = other RNA
  modified_base 1: mod_base = OTHER; note = 2'-Omethylguanosine phosphorothiorate
  modified_base 2: mod_base = OTHER; note = 2'-Omethylguanosine phosphorothiorate
  modified_base 3: mod_base = OTHER; note = 2'-Omethylcytosine
  modified_base 4: mod_base = OTHER; note = 2'-Omethylcytosine
  modified_base 5: mod_base = OTHER; note = 2'-Omethylcytosine
  modified_base 6: mod_base = OTHER; note = 2'-Omethylcytosine
  modified_base 16: mod_base = OTHER; note = 2'-Omethyluridine
  modified_base 17: mod_base = OTHER; note = 2'-Omethylguanosine
  modified_base 18: mod_base = OTHER; note = 2'-Omethylguanosine
  modified_base 20: mod_base = OTHER; note = 2'-Omethyluridine
  modified_base 25: mod_base = OTHER; note = 2'-Omethylcytosine
  modified_base 33: mod_base = OTHER; note = 2'-fluorouridine
  modified_base 35: mod_base = OTHER; note = Cytosine phosphorothiorate
  modified_base 37: mod_base = OTHER; note = Adenosine phosphorothiorate
  modified_base 38: mod_base = OTHER; note = Adenosine phosphorothiorate
  modified_base 41: mod_base = OTHER; note = 2'-Omethylcytosine
  modified_base 44: mod_base = OTHER; note = 2'-Omethyladenosine
  modified_base 45: mod_base = OTHER; note = 2'-Omethylguanosine
  modified_base 46: mod_base = OTHER; note = 2'-fluoroguanosine
  modified_base 47: mod_base = OTHER; note = 2'-fluorouridine
  modified_base 48: mod_base = OTHER; note = 2'-fluorouridine
  modified_base 56: mod_base = OTHER; note = 2'-Omethylcytosine
  modified_base 59: mod_base = OTHER; note = 2'-Omethylguanosine
  modified_base 73: mod_base = OTHER; note = 2'-Omethylguanosine

SEQ ID NO: 9066 - RNA, 76 nt, synthetic construct; identical to SEQ ID NO: 625
  source 1..76: mol_type = other RNA
  modified_base 5: mod_base = OTHER; note = 2'-Omethylcytosine
  modified_base 8: mod_base = OTHER; note = Uridine phosphorothiorate
  modified_base 11: mod_base = OTHER; note = 2'-Omethylcytosine
  modified_base 12: mod_base = OTHER; note = 2'-Omethylguanosine
  modified_base 15: mod_base = OTHER; note = Adenosine phosphorothiorate
  modified_base 17: mod_base = OTHER; note = 2'-Omethylguanosine
  modified_base 18: mod_base = OTHER; note = 2'-Omethylguanosine
  modified_base 19: mod_base = OTHER; note = Adenosine phosphorothiorate
  modified_base 20: mod_base = OTHER; note = 2'-Omethyluridine phosphorothiorate
  modified_base 22: mod_base = OTHER; note = 2'-fluoroguanosine
  modified_base 29: mod_base = OTHER; note = 2'-Omethylguanosine
  modified_base 31: mod_base = OTHER; note = 2'-fluoroadenosine
  modified_base 36: mod_base = OTHER; note = Adenosine phosphorothiorate
  modified_base 39: mod_base = OTHER; note = Uridine phosphorothiorate
  modified_base 40: mod_base = OTHER; note = 2'-Omethyluridine
  modified_base 41: mod_base = OTHER; note = 2'-fluorocytosine
  modified_base 43: mod_base = OTHER; note = Adenosine phosphorothiorate
  modified_base 44: mod_base = OTHER; note = 2'-fluoroadenosine phosphorothiorate
  modified_base 45: mod_base = OTHER; note = 2'-fluoroguanosine phosphorothiorate
  modified_base 46: mod_base = OTHER; note = 2'-Omethylguanosine phosphorothiorate
  modified_base 47: mod_base = OTHER; note = 2'-fluorouridine
  modified_base 48: mod_base = OTHER; note = 2'-fluorouridine phosphorothiorate
  modified_base 50: mod_base = OTHER; note = 2'-fluorocytosine
  modified_base 55: mod_base = OTHER; note = Uridine phosphorothiorate
  modified_base 56: mod_base = OTHER; note = 2'-fluorocytosine
  modified_base 58: mod_base = OTHER; note = Adenosine phosphorothiorate
  modified_base 59: mod_base = OTHER; note = 2'-fluoroguanosine
  modified_base 60: mod_base = OTHER; note = 2'-fluorouridine
  modified_base 64: mod_base = OTHER; note = 2'-Omethylguanosine
  modified_base 66: mod_base = OTHER; note = 2'-fluorocytosine
  modified_base 67: mod_base = OTHER; note = 2'-fluoroguanosine
  modified_base 68: mod_base = OTHER; note = 2'-Omethylguanosine
  modified_base 69: mod_base = OTHER; note = Adenosine phosphorothiorate
  modified_base 70: mod_base = OTHER; note = 2'-fluoroguanosine
  modified_base 71: mod_base = OTHER; note = 2'-Omethyluridine
  modified_base 72: mod_base = OTHER; note = Cytosine phosphorothiorate
  modified_base 73: mod_base = OTHER; note = 2'-Omethylguanosine phosphorothiorate

SEQ ID NO: 9067 - RNA, 85 nt, synthetic construct; identical to SEQ ID NO: 3297
  source 1..85: mol_type = other RNA
  modified_base 1: mod_base = OTHER; note = 2'-Omethylguanosine phosphorothiorate
  modified_base 2: mod_base = OTHER; note = 2'-Omethylcytosine
  modified_base 3: mod_base = OTHER; note = 2'-Omethyluridine
  modified_base 4: mod_base = OTHER; note = 2'-Omethylguanosine
  modified_base 5: mod_base = OTHER; note = 2'-Omethyluridine
  modified_base 6: mod_base = OTHER; note = 2'-Omethylguanosine
  modified_base 43: mod_base = OTHER; note = 2'-Omethyladenosine
  modified_base 44: mod_base = OTHER; note = 2'-Omethyluridine
  modified_base 56: mod_base = OTHER; note = 2'-fluoroguanosine
  modified_base 57: mod_base = OTHER; note = 2'-fluorocytosine
  modified_base 82: mod_base = OTHER; note = 2'-Omethylguanosine

SEQ ID NO: 9068 - RNA, 76 nt, synthetic construct; identical to SEQ ID NO: 625
  source 1..76: mol_type = other RNA
  modified_base 1: mod_base = OTHER; note = 2'-Omethylguanosine phosphorothiorate
  modified_base 2: mod_base = OTHER; note = 2'-Omethylguanosine
  modified_base 4: mod_base = OTHER; note = 2'-fluorouridine
  modified_base 8: mod_base = OTHER; note = Uridine phosphorothiorate
  modified_base 12: mod_base = OTHER; note = 2'-fluoroguanosine
  modified_base 13: mod_base = OTHER; note = 2'-fluorocytosine
  modified_base 14: mod_base = OTHER; note = 2'-Omethyladenosine
  modified_base 15: mod_base = OTHER; note = 2'-fluoroadenosine
  modified_base 17: mod_base = OTHER; note = Guanosine phosphorothiorate
  modified_base 26: mod_base = OTHER; note = 2'-fluoroadenosine
  modified_base 27: mod_base = OTHER; note = 2'-Omethyluridine phosphorothiorate
  modified_base 28: mod_base = OTHER; note = 2'-fluorouridine
  modified_base 33: mod_base = OTHER; note = Uridine phosphorothiorate
  modified_base 34: mod_base = OTHER; note = 2'-Omethyluridine
  modified_base 36: mod_base = OTHER; note = Adenosine phosphorothiorate
  modified_base 40: mod_base = OTHER; note = 2'-Omethyluridine
  modified_base 41: mod_base = OTHER; note = 2'-fluorocytosine phosphorothiorate
  modified_base 44: mod_base = OTHER; note = 2'-fluoroadenosine
  modified_base 45: mod_base = OTHER; note = 2'-fluoroguanosine
  modified_base 46: mod_base = OTHER; note = 2'-fluoroguanosine
  modified_base 47: mod_base = OTHER; note = 2'-Omethyluridine
  modified_base 53: mod_base = OTHER; note = 2'-fluoroguanosine
  modified_base 54: mod_base = OTHER; note = 2'-fluorouridine phosphorothiorate
  modified_base 58: mod_base = OTHER; note = Adenosine phosphorothiorate
  modified_base 59: mod_base = OTHER; note = 2'-Omethylguanosine
  modified_base 60: mod_base = OTHER; note = Uridine phosphorothiorate
  modified_base 62: mod_base = OTHER; note = 2'-Omethylcytosine
  modified_base 63: mod_base = OTHER; note = 2'-fluorocytosine
  modified_base 64: mod_base = OTHER; note = 2'-Omethylguanosine
  modified_base 66: mod_base = OTHER; note = Cytosine phosphorothiorate
  modified_base 67: mod_base = OTHER; note = 2'-Omethylguanosine phosphorothiorate
  modified_base 68: mod_base = OTHER; note = 2'-fluoroguanosine

SEQ ID NO: 9069 - RNA, 85 nt, synthetic construct; identical to SEQ ID NO: 3317
  source 1..85: mol_type = other RNA
  modified_base 1: mod_base = OTHER; note = 2'-Omethylguanosine phosphorothiorate
  modified_base 3: mod_base = OTHER; note = Uridine phosphorothiorate
  modified_base 18: mod_base = OTHER; note = 2'-Omethylguanosine
  modified_base 20: mod_base = OTHER; note = 2'-Omethyluridine
  modified_base 47: mod_base = OTHER; note = 2'-Omethylguanosine
  modified_base 59: mod_base = OTHER; note = Cytosine phosphorothiorate
  modified_base 61: mod_base = OTHER; note = 2'-Omethylguanosine
  modified_base 82: mod_base = OTHER; note = 2'-Omethylguanosine

SEQ ID NO: 9070 - RNA, 73 nt, synthetic construct; identical to SEQ ID NO: 935
  source 1..73: mol_type = other RNA
  modified_base 1: mod_base = OTHER; note = 2'-Omethylguanosine phosphorothiorate
  modified_base 2: mod_base = OTHER; note = 2'-Omethylguanosine phosphorothiorate
  modified_base 43: mod_base = OTHER; note = Adenosine phosphorothiorate
  modified_base 55: mod_base = OTHER; note = Uridine phosphorothiorate

SEQ ID NO: 9071 - RNA, 76 nt, synthetic construct; identical to SEQ ID NO: 625
  source 1..76: mol_type = other RNA
  modified_base 1: mod_base = OTHER; note = 2'-Omethylguanosine
  modified_base 5: mod_base = OTHER; note = 2'-Omethylcytosine
  modified_base 7: mod_base = OTHER; note = Guanosine phosphorothiorate
  modified_base 10: mod_base = OTHER; note = Guanosine phosphorothiorate
  modified_base 13: mod_base = OTHER; note = 2'-fluorocytosine phosphorothiorate
  modified_base 16: mod_base = OTHER; note = 2'-fluorouridine
  modified_base 17: mod_base = OTHER; note = Guanosine phosphorothiorate
  modified_base 18: mod_base = OTHER; note = 2'-Omethylguanosine
  modified_base 21: mod_base = OTHER; note = Adenosine phosphorothiorate
  modified_base 22: mod_base = OTHER; note = 2'-Omethylguanosine
  modified_base 28: mod_base = OTHER; note = 2'-Omethyluridine
  modified_base 31: mod_base = OTHER; note = 2'-fluoroadenosine
  modified_base 34: mod_base = OTHER; note = 2'-Omethyluridine
  modified_base 38: mod_base = OTHER; note = 2'-Omethyladenosine phosphorothiorate
  modified_base 39: mod_base = OTHER; note = 2'-Omethyluridine phosphorothiorate
  modified_base 40: mod_base = OTHER; note = 2'-Omethyluridine
  modified_base 45: mod_base = OTHER; note = 2'-Omethylguanosine
  modified_base 47: mod_base = OTHER; note = Uridine phosphorothiorate
  modified_base 49: mod_base = OTHER; note = 2'-fluorocytosine
  modified_base 51: mod_base = OTHER; note = 2'-Omethylguanosine
  modified_base 54: mod_base = OTHER; note = 2'-Omethyluridine phosphorothiorate
  modified_base 56: mod_base = OTHER; note = 2'-fluorocytosine
  modified_base 58: mod_base = OTHER; note = Adenosine phosphorothiorate
  modified_base 59: mod_base = OTHER; note = 2'-Omethylguanosine phosphorothiorate
  modified_base 60: mod_base = OTHER; note = 2'-Omethyluridine
  modified_base 64: mod_base = OTHER; note = Guanosine phosphorothiorate
  modified_base 65: mod_base = OTHER; note = 2'-Omethylguanosine
  modified_base 66: mod_base = OTHER; note = 2'-Omethylcytosine
  modified_base 68: mod_base = OTHER; note = 2'-fluoroguanosine
  modified_base 71: mod_base = OTHER; note = 2'-Omethyluridine
  modified_base 72: mod_base = OTHER; note = 2'-fluorocytosine

SEQ ID NO: 9072 - RNA, 86 nt, synthetic construct; identical to SEQ ID NO: 3290
  source 1..86: mol_type = other RNA
  modified_base 1: mod_base = OTHER; note = 2'-Omethyladenosine phosphorothiorate
  modified_base 2: mod_base = OTHER; note = 2'-Omethylcytosine phosphorothiorate
  modified_base 3: mod_base = OTHER; note = 2'-Omethylcytosine
  modified_base 4: mod_base = OTHER; note = 2'-Omethyladenosine
  modified_base 5: mod_base = OTHER; note = 2'-Omethylguanosine
  modified_base 6: mod_base = OTHER; note = 2'-Omethylguanosine
  modified_base 10: mod_base = OTHER; note = 2'-Omethylguanosine
  modified_base 11: mod_base = OTHER; note = 2'-Omethylcytosine
  modified_base 12: mod_base = OTHER; note = 2'-Omethylcytosine
  modified_base 13: mod_base = OTHER; note = 2'-Omethylguanosine
  modified_base 22: mod_base = OTHER; note = 2'-Omethyladenosine
  modified_base 23: mod_base = OTHER; note = 2'-Omethylguanosine
  modified_base 24: mod_base = OTHER; note = 2'-Omethylguanosine
  modified_base 25: mod_base = OTHER; note = 2'-Omethylcytosine
  modified_base 33: mod_base = OTHER; note = 2'-fluorouridine
  modified_base 35: mod_base = OTHER; note = Cytosine phosphorothiorate
  modified_base 37: mod_base = OTHER; note = Guanosine phosphorothiorate
  modified_base 38: mod_base = OTHER; note = Adenosine phosphorothiorate
  modified_base 59: mod_base = OTHER; note = 2'-Omethylguanosine
  modified_base 60: mod_base = OTHER; note = 2'-Omethyluridine
  modified_base 61: mod_base = OTHER; note = 2'-Omethylguanosine
  modified_base 62: mod_base = OTHER; note = 2'-Omethylguanosine
  modified_base 63: mod_base = OTHER; note = 2'-Omethylguanosine
  modified_base 64: mod_base = OTHER; note = 2'-Omethyluridine
  modified_base 66: mod_base = OTHER; note = 2'-Omethylcytosine
  modified_base 69: mod_base = OTHER; note = 2'-Omethyladenosine
  modified_base 71: mod_base = OTHER; note = 2'-Omethylcytosine
  modified_base 72: mod_base = OTHER; note = 2'-Omethylcytosine
  modified_base 73: mod_base = OTHER; note = 2'-fluorocytosine
  modified_base 74: mod_base = OTHER; note = 2'-Omethyladenosine
  modified_base 75: mod_base = OTHER; note = 2'-Omethylcytosine
  modified_base 76: mod_base = OTHER; note = 2'-Omethyluridine
  modified_base 77: mod_base = OTHER; note = 2'-Omethylcytosine
  modified_base 78: mod_base = OTHER; note = 2'-Omethylcytosine
  modified_base 83: mod_base = OTHER; note = 2'-Omethyladenosine

SEQ ID NO: 9073 - RNA, 85 nt, synthetic construct; identical to SEQ ID NO: 3317
  source 1..85: mol_type = other RNA
  modified_base 1: mod_base = OTHER; note = 2'-Omethylguanosine phosphorothiorate
  modified_base 2: mod_base = OTHER; note = 2'-Omethylcytosine
  modified_base 10: mod_base = OTHER; note = Guanosine phosphorothiorate
  modified_base 28: mod_base = OTHER; note = 2'-fluorouridine
  modified_base 33: mod_base = OTHER; note = 2'-fluorouridine
  modified_base 44: mod_base = OTHER; note = 2'-Omethyluridine phosphorothiorate
  modified_base 54: mod_base = OTHER; note = 2'-Omethylcytosine
  modified_base 82: mod_base = OTHER; note = 2'-Omethylguanosine

SEQ ID NO: 9074 - RNA, 76 nt, synthetic construct; identical to SEQ ID NO: 3289
  source 1..76: mol_type = other RNA
  modified_base 1: mod_base = OTHER; note = 2'-Omethylguanosine
  modified_base 2: mod_base = OTHER; note = 2'-Omethylcytosine
  modified_base 3: mod_base = OTHER; note = 2'-Omethylcytosine
  modified_base 4: mod_base = OTHER; note = 2'-Omethyluridine
  modified_base 5: mod_base = OTHER; note = 2'-Omethylguanosine
  modified_base 6: mod_base = OTHER; note = 2'-Omethylguanosine
  modified_base 16: mod_base = OTHER; note = 2'-Omethyluridine
  modified_base 18: mod_base = OTHER; note = 2'-Omethylguanosine
  modified_base 19: mod_base = OTHER; note = 2'-Omethylguanosine
  modified_base 22: mod_base = OTHER; note = 2'-Omethylguanosine
  modified_base 23: mod_base = OTHER; note = 2'-Omethyladenosine
  modified_base 24: mod_base = OTHER; note = 2'-Omethylguanosine
  modified_base 25: mod_base = OTHER; note = 2'-Omethylcytosine
  modified_base 33: mod_base = OTHER; note = 2'-fluorouridine
  modified_base 35: mod_base = OTHER; note = Uridine phosphorothiorate
  modified_base 37: mod_base = OTHER; note = Adenosine phosphorothiorate
  modified_base 38: mod_base = OTHER; note = Adenosine phosphorothiorate
  modified_base 41: mod_base = OTHER; note = 2'-Omethyluridine
  modified_base 42: mod_base = OTHER; note = 2'-Omethylguanosine
  modified_base 43: mod_base = OTHER; note = 2'-Omethyladenosine
  modified_base 44: mod_base = OTHER; note = 2'-Omethylguanosine
  modified_base 45: mod_base = OTHER; note = 2'-Omethylguanosine
  modified_base 46: mod_base = OTHER; note = 2'-fluoroguanosine
  modified_base 48: mod_base = OTHER; note = 2'-fluorocytosine
  modified_base 49: mod_base = OTHER; note = 2'-Omethylcytosine
  modified_base 50: mod_base = OTHER; note = 2'-Omethyladenosine
  modified_base 52: mod_base = OTHER; note = 2'-Omethylguanosine
  modified_base 54: mod_base = OTHER; note = 2'-Omethyluridine
  modified_base 55: mod_base = OTHER; note = Uridine phosphorothiorate
  modified_base 56: mod_base = OTHER; note = 2'-Omethylcytosine
  modified_base 57: mod_base = OTHER; note = 2'-fluoroadenosine
  modified_base 59: mod_base = OTHER; note = 2'-Omethylguanosine
  modified_base 61: mod_base = OTHER; note = 2'-Omethylcytosine
  modified_base 65: mod_base = OTHER; note = 2'-Omethylguanosine
  modified_base 73: mod_base = OTHER; note = 2'-Omethylguanosine

SEQ ID NO: 9075 - RNA, 76 nt, synthetic construct; identical to SEQ ID NO: 625
  source 1..76: mol_type = other RNA
  modified_base 1: mod_base = OTHER; note = 2'-Omethylguanosine phosphorothiorate
  modified_base 2: mod_base = OTHER; note = 2'-Omethylguanosine
  modified_base 3: mod_base = OTHER; note = 2'-Omethylcytosine
  modified_base 4: mod_base = OTHER; note = 2'-Omethyluridine
  modified_base 5: mod_base = OTHER; note = 2'-Omethylcytosine
  modified_base 6: mod_base = OTHER; note = 2'-Omethylcytosine
  modified_base 10: mod_base = OTHER; note = 2'-Omethylguanosine
  modified_base 13: mod_base = OTHER; note = 2'-Omethylcytosine
  modified_base 14: mod_base = OTHER; note = 2'-Omethyladenosine
  modified_base 15: mod_base = OTHER; note = 2'-fluoroadenosine
  modified_base 16: mod_base = OTHER; note = 2'-Omethyluridine
  modified_base 17: mod_base = OTHER; note = Guanosine phosphorothiorate
  modified_base 18: mod_base = OTHER; note = 2'-Omethylguanosine
  modified_base 19: mod_base = OTHER; note = Adenosine phosphorothiorate
  modified_base 20: mod_base = OTHER; note = 2'-Omethyluridine
  modified_base 25: mod_base = OTHER; note = 2'-Omethylcytosine
  modified_base 29: mod_base = OTHER; note = 2'-Omethylguanosine
  modified_base 33: mod_base = OTHER; note = 2'-fluorouridine
  modified_base 35: mod_base = OTHER; note = Cytosine phosphorothiorate
  modified_base 37: mod_base = OTHER; note = Adenosine phosphorothiorate
  modified_base 38: mod_base = OTHER; note = Adenosine phosphorothiorate
  modified_base 40: mod_base = OTHER; note = 2'-fluorouridine
  modified_base 41: mod_base = OTHER; note = 2'-Omethylcytosine
  modified_base 42: mod_base = OTHER; note = 2'-Omethyladenosine
  modified_base 43: mod_base = OTHER; note = 2'-Omethyladenosine
  modified_base 44: mod_base = OTHER; note = 2'-fluoroadenosine
  modified_base 46: mod_base = OTHER; note = Guanosine phosphorothiorate
  modified_base 49: mod_base = OTHER; note = 2'-Omethylcytosine
  modified_base 50: mod_base = OTHER; note = 2'-Omethylcytosine
  modified_base 51: mod_base = OTHER; note = 2'-Omethylguanosine
  modified_base 52: mod_base = OTHER; note = 2'-Omethylguanosine
  modified_base 53: mod_base = OTHER; note = 2'-Omethylguanosine
  modified_base 54: mod_base = OTHER; note = Uridine phosphorothiorate
  modified_base 55: mod_base = OTHER; note = Uridine phosphorothiorate
  modified_base 56: mod_base = OTHER; note = 2'-Omethylcytosine
  modified_base 57: mod_base = OTHER; note = Guanosine phosphorothiorate
  modified_base 61: mod_base = OTHER; note = 2'-Omethylcytosine
  modified_base 62: mod_base = OTHER; note = 2'-Omethylcytosine
  modified_base 63: mod_base = OTHER; note = 2'-fluorocytosine
  modified_base 64: mod_base = OTHER; note = 2'-Omethylguanosine
  modified_base 65: mod_base = OTHER; note = 2'-Omethylguanosine
  modified_base 66: mod_base = OTHER; note = 2'-Omethylcytosine
  modified_base 67: mod_base = OTHER; note = 2'-Omethylguanosine
  modified_base 68: mod_base = OTHER; note = 2'-Omethylguanosine
  modified_base 69: mod_base = OTHER; note = 2'-fluoroadenosine
  modified_base 71: mod_base = OTHER; note = 2'-Omethyluridine
  modified_base 73: mod_base = OTHER; note = 2'-Omethylguanosine
  modified_base 75: mod_base = OTHER; note = 2'-fluorocytosine phosphorothiorate

SEQ ID NO: 9076 - RNA, 76 nt, synthetic construct; identical to SEQ ID NO: 625
  source 1..76: mol_type = other RNA
  modified_base 1: mod_base = OTHER; note = 2'-Omethylguanosine
  modified_base 10: mod_base = OTHER; note = 2'-Omethylguanosine
  modified_base 13: mod_base = OTHER; note = 2'-Omethylcytosine
  modified_base 17: mod_base = OTHER; note = Guanosine phosphorothiorate
  modified_base 18: mod_base = OTHER; note = 2'-Omethylguanosine
  modified_base 19: mod_base = OTHER; note = Adenosine phosphorothiorate
  modified_base 20: mod_base = OTHER; note = 2'-Omethyluridine
  modified_base 25: mod_base = OTHER; note = 2'-Omethylcytosine
  modified_base 29: mod_base = OTHER; note = 2'-Omethylguanosine
  modified_base 33: mod_base = OTHER; note = 2'-fluorouridine
  modified_base 35: mod_base = OTHER; note = Cytosine phosphorothiorate
  modified_base 37: mod_base = OTHER; note = Adenosine phosphorothiorate
  modified_base 38: mod_base = OTHER; note = Adenosine phosphorothiorate
  modified_base 41: mod_base = OTHER; note = 2'-fluorocytosine phosphorothiorate
  modified_base 43: mod_base = OTHER; note = 2'-Omethyladenosine
  modified_base 44: mod_base = OTHER; note = 2'-fluoroadenosine
  modified_base 50: mod_base = OTHER; note = 2'-Omethylcytosine
  modified_base 52: mod_base = OTHER; note = 2'-Omethylguanosine
  modified_base 54: mod_base = OTHER; note = Uridine phosphorothiorate
  modified_base 55: mod_base = OTHER; note = Uridine phosphorothiorate
  modified_base 56: mod_base = OTHER; note = 2'-Omethylcytosine
  modified_base 57: mod_base = OTHER; note = 2'-Omethylguanosine phosphorothiorate
  modified_base 62: mod_base = OTHER; note = 2'-Omethylcytosine
  modified_base 63: mod_base = OTHER; note = 2'-fluorocytosine
  modified_base 65: mod_base = OTHER; note = 2'-Omethylguanosine
  modified_base 71: mod_base = OTHER; note = 2'-Omethyluridine
  modified_base 73: mod_base = OTHER; note = 2'-Omethylguanosine

SEQ ID NO: 9077 - RNA, 76 nt, synthetic construct; identical to SEQ ID NO: 3289
  source 1..76: mol_type = other RNA
  modified_base 1: mod_base = OTHER; note = 2'-Omethylguanosine phosphorothiorate
  modified_base 2: mod_base = OTHER; note = 2'-Omethylcytosine phosphorothiorate
  modified_base 3: mod_base = OTHER; note = 2'-Omethylcytosine
  modified_base 4: mod_base = OTHER; note = 2'-Omethyluridine
  modified_base 5: mod_base = OTHER; note = 2'-Omethylguanosine
  modified_base 6: mod_base = OTHER; note = 2'-Omethylguanosine
  modified_base 16: mod_base = OTHER; note = 2'-Omethyluridine
  modified_base 18: mod_base = OTHER; note = 2'-Omethylguanosine
  modified_base 19: mod_base = OTHER; note = 2'-Omethylguanosine
  modified_base 25: mod_base = OTHER; note = 2'-Omethylcytosine
  modified_base 33: mod_base = OTHER; note = 2'-fluorouridine
  modified_base 35: mod_base = OTHER; note = Uridine phosphorothiorate
  modified_base 37: mod_base = OTHER; note = Adenosine phosphorothiorate
  modified_base 38: mod_base = OTHER; note = Adenosine phosphorothiorate
  modified_base 41: mod_base = OTHER; note = 2'-Omethyluridine
  modified_base 44: mod_base = OTHER; note = 2'-Omethylguanosine
  modified_base 45: mod_base = OTHER; note = 2'-Omethylguanosine
  modified_base 46: mod_base = OTHER; note = 2'-fluoroguanosine
  modified_base 47: mod_base = OTHER; note = 2'-fluorouridine
  modified_base 48: mod_base = OTHER; note = 2'-fluorocytosine
  modified_base 56: mod_base = OTHER; note = 2'-Omethylcytosine
  modified_base 59: mod_base = OTHER; note = 2'-Omethylguanosine
  modified_base 73: mod_base = OTHER; note = 2'-Omethylguanosine

SEQ ID NO: 9078 - RNA, 75 nt, synthetic construct; identical to SEQ ID NO: 3299
  source 1..75: mol_type = other RNA
  modified_base 2: mod_base = OTHER; note = 2'-Omethylcytosine phosphorothiorate
  modified_base 9: mod_base = OTHER; note = 2'-Omethylguanosine
  modified_base 15: mod_base = OTHER; note = 2'-Omethyluridine
  modified_base 18: mod_base = OTHER; note = 2'-fluoroguanosine
  modified_base 23: mod_base = OTHER; note = Guanosine phosphorothiorate
  modified_base 25: mod_base = OTHER; note = 2'-fluoroadenosine phosphorothiorate
  modified_base 27: mod_base = OTHER; note = Cytosine phosphorothiorate
  modified_base 34: mod_base = OTHER; note = 2'-fluorouridine
  modified_base 36: mod_base = OTHER; note = 2'-fluoroadenosine phosphorothiorate
  modified_base 40: mod_base = OTHER; note = 2'-fluorouridine
  modified_base 46: mod_base = OTHER; note = 2'-fluorouridine
  modified_base 47: mod_base = OTHER; note = 2'-fluorocytosine
  modified_base 48: mod_base = OTHER; note = 2'-Omethylcytosine phosphorothiorate
  modified_base 50: mod_base = OTHER; note = 2'-fluoroguanosine
  modified_base 56: mod_base = OTHER; note = 2'-Omethyladenosine phosphorothiorate
  modified_base 58: mod_base = OTHER; note = 2'-Omethylguanosine phosphorothiorate
  modified_base 59: mod_base = OTHER; note = Uridine phosphorothiorate
  modified_base 69: mod_base = OTHER; note = Guanosine phosphorothiorate
  modified_base 73: mod_base = OTHER; note = Cytosine phosphorothiorate
  modified_base 74: mod_base = OTHER; note = Cytosine phosphorothiorate

SEQ ID NO: 9079 - RNA, 76 nt, synthetic construct; identical to SEQ ID NO: 625
  source 1..76: mol_type = other RNA
  modified_base 3: mod_base = OTHER; note = 2'-Omethylcytosine
  modified_base 4: mod_base = OTHER; note = 2'-fluorouridine
  modified_base 6: mod_base = OTHER; note = 2'-fluorocytosine
  modified_base 11: mod_base = OTHER; note = Cytosine phosphorothiorate
  modified_base 12: mod_base = OTHER; note = 2'-Omethylguanosine phosphorothiorate
  modified_base 14: mod_base = OTHER; note = 2'-fluoroadenosine
  modified_base 16: mod_base = OTHER; note = 2'-fluorouridine
  modified_base 18: mod_base = OTHER; note = 2'-fluoroguanosine
  modified_base 20: mod_base = OTHER; note = 2'-fluorouridine
  modified_base 24: mod_base = OTHER; note = 2'-Omethylguanosine
  modified_base 26: mod_base = OTHER; note = 2'-Omethyladenosine
  modified_base 27: mod_base = OTHER; note = 2'-Omethyluridine
  modified_base 28: mod_base = OTHER; note = 2'-fluorouridine
  modified_base 29: mod_base = OTHER; note = 2'-fluoroguanosine
  modified_base 31: mod_base = OTHER; note = 2'-Omethyladenosine
  modified_base 34: mod_base = OTHER; note = 2'-fluorouridine
  modified_base 37: mod_base = OTHER; note = Adenosine phosphorothiorate
  modified_base 38: mod_base = OTHER; note = 2'-fluoroadenosine
  modified_base 40: mod_base = OTHER; note = 2'-Omethyluridine phosphorothiorate
  modified_base 41: mod_base = OTHER; note = 2'-Omethylcytosine
  modified_base 46: mod_base = OTHER; note = 2'-fluoroguanosine
  modified_base 54: mod_base = OTHER; note = 2'-Omethyluridine
  modified_base 56: mod_base = OTHER; note = 2'-Omethylcytosine
  modified_base 57: mod_base = OTHER; note = 2'-Omethylguanosine
  modified_base 60: mod_base = OTHER; note = 2'-fluorouridine
  modified_base 61: mod_base = OTHER; note = 2'-fluorocytosine
  modified_base 62: mod_base = OTHER; note = Cytosine phosphorothiorate
  modified_base 63: mod_base = OTHER; note = 2'-fluorocytosine
  modified_base 65: mod_base = OTHER; note = 2'-fluoroguanosine
  modified_base 66: mod_base = OTHER; note = Cytosine phosphorothiorate
  modified_base 67: mod_base = OTHER; note = 2'-fluoroguanosine
  modified_base 68: mod_base = OTHER; note = 2'-Omethylguanosine
  modified_base 69: mod_base = OTHER; note = 2'-fluoroadenosine
  modified_base 71: mod_base = OTHER; note = Uridine phosphorothiorate
  modified_base 73: mod_base = OTHER; note = 2'-fluoroguanosine

SEQ ID NO: 9080 - RNA, 76 nt, synthetic construct
  source 1..76: mol_type = other RNA
ggctccgtggcgcaatggatagcgcattggacttcaaattcaaaggcagccggttcgagtccggccggagtcgcca

SEQ ID NO: 9081 - RNA, 85 nt, synthetic construct; identical to SEQ ID NO: 3317
  source 1..85: mol_type = other RNA
  modified_base 1: mod_base = OTHER; note = 2'-Omethylguanosine phosphorothiorate
  modified_base 2: mod_base = OTHER; note = 2'-Omethylcytosine
  modified_base 3: mod_base = OTHER; note = 2'-Omethyluridine phosphorothiorate
  modified_base 10: mod_base = OTHER; note = 2'-fluoroguanosine
  modified_base 11: mod_base = OTHER; note = 2'-fluorocytosine
  modified_base 17: mod_base = OTHER; note = Guanosine phosphorothiorate
  modified_base 20: mod_base = OTHER; note = 2'-Omethyluridine phosphorothiorate
  modified_base 24: mod_base = OTHER; note = 2'-Omethylguanosine phosphorothiorate
  modified_base 34: mod_base = OTHER; note = 2'-fluorocytosine
  modified_base 35: mod_base = OTHER; note = 2'-fluorouridine
  modified_base 36: mod_base = OTHER; note = 2'-Omethyladenosine
  modified_base 38: mod_base = OTHER; note = 2'-fluoroadenosine phosphorothiorate
  modified_base 45: mod_base = OTHER; note = Guanosine phosphorothiorate
  modified_base 48: mod_base = OTHER; note = 2'-Omethylguanosine phosphorothiorate
  modified_base 50: mod_base = OTHER; note = 2'-Omethylcytosine
  modified_base 51: mod_base = OTHER; note = 2'-Omethyluridine phosphorothiorate
  modified_base 61: mod_base = OTHER; note = 2'-Omethylguanosine
  modified_base 71: mod_base = OTHER; note = Cytosine phosphorothiorate
  modified_base 73: mod_base = OTHER; note = 2'-fluoroguanosine
  modified_base 82: mod_base = OTHER; note = 2'-Omethylguanosine

SEQ ID NO: 9082 - RNA, 76 nt, synthetic construct; identical to SEQ ID NO: 3289
  source 1..76: mol_type = other RNA
  modified_base 1: mod_base = OTHER; note = 2'-Omethylguanosine
  modified_base 10: mod_base = OTHER; note = 2'-Omethylguanosine
  modified_base 11: mod_base = OTHER; note = 2'-Omethylcytosine
  modified_base 12: mod_base = OTHER; note = 2'-Omethyluridine
  modified_base 13: mod_base = OTHER; note = 2'-Omethylcytosine
  modified_base 14: mod_base = OTHER; note = 2'-Omethyladenosine
  modified_base 15: mod_base = OTHER; note = 2'-Omethylguanosine
  modified_base 16: mod_base = OTHER; note = 2'-Omethyluridine
  modified_base 18: mod_base = OTHER; note = 2'-Omethylguanosine
  modified_base 19: mod_base = OTHER; note = 2'-Omethylguanosine
  modified_base 20: mod_base = OTHER; note = Uridine phosphorothiorate
  modified_base 21: mod_base = OTHER; note = Adenosine phosphorothiorate
  modified_base 25: mod_base = OTHER; note = 2'-Omethylcytosine
  modified_base 41: mod_base = OTHER; note = 2'-Omethyluridine
  modified_base 42: mod_base = OTHER; note = 2'-Omethylguanosine
  modified_base 43: mod_base = OTHER; note = 2'-Omethyladenosine
  modified_base 44: mod_base = OTHER; note = 2'-Omethylguanosine
  modified_base 49: mod_base = OTHER; note = 2'-Omethylcytosine
  modified_base 50: mod_base = OTHER; note = 2'-Omethyladenosine
  modified_base 52: mod_base = OTHER; note = 2'-Omethylguanosine
  modified_base 54: mod_base = OTHER; note = Uridine phosphorothiorate
  modified_base 55: mod_base = OTHER; note = Uridine phosphorothiorate
  modified_base 61: mod_base = OTHER; note = 2'-Omethylcytosine
  modified_base 65: mod_base = OTHER; note = 2'-Omethylguanosine
  modified_base 73: mod_base = OTHER; note = 2'-Omethylguanosine

SEQ ID NO: 9083 - RNA, 76 nt, synthetic construct; identical to SEQ ID NO: 625
  source 1..76: mol_type = other RNA
  modified_base 1: mod_base = OTHER; note = 2'-Omethylguanosine phosphorothiorate
  modified_base 2: mod_base = OTHER; note = 2'-Omethylguanosine phosphorothiorate
  modified_base 3: mod_base = OTHER; note = 2'-Omethylcytosine
  modified_base 4: mod_base = OTHER; note = 2'-Omethyluridine
  modified_base 5: mod_base = OTHER; note = 2'-Omethylcytosine
  modified_base 6: mod_base = OTHER; note = 2'-Omethylcytosine
  modified_base 10: mod_base = OTHER; note = 2'-Omethylguanosine
  modified_base 11: mod_base = OTHER; note = 2'-Omethylcytosine
  modified_base 12: mod_base = OTHER; note = 2'-Omethylguanosine
  modified_base 13: mod_base = OTHER; note = 2'-Omethylcytosine
  modified_base 14: mod_base = OTHER; note = 2'-Omethyladenosine
  modified_base 15: mod_base = OTHER; note = 2'-fluoroadenosine
  modified_base 16: mod_base = OTHER; note = 2'-Omethyluridine
  modified_base 17: mod_base = OTHER; note = 2'-Omethylguanosine
  modified_base 18: mod_base = OTHER; note = 2'-Omethylguanosine
  modified_base 19: mod_base = OTHER; note = 2'-fluoroadenosine
  modified_base 20: mod_base = OTHER; note = 2'-Omethyluridine
  modified_base 22: mod_base = OTHER; note = 2'-Omethylguanosine
  modified_base 23: mod_base = OTHER; note = 2'-Omethylcytosine
  modified_base 24: mod_base = OTHER; note = 2'-Omethylguanosine
  modified_base 25: mod_base = OTHER; note = 2'-Omethylcytosine
  modified_base 38: mod_base = OTHER; note = Adenosine phosphorothiorate
  modified_base 39: mod_base = OTHER; note = Uridine phosphorothiorate
  modified_base 40: mod_base = OTHER; note = 2'-fluorouridine
  modified_base 43: mod_base = OTHER; note = 2'-Omethyladenosine
  modified_base 44: mod_base = OTHER; note = 2'-Omethyladenosine
  modified_base 45: mod_base = OTHER; note = 2'-Omethylguanosine
  modified_base 46: mod_base = OTHER; note = 2'-fluoroguanosine
  modified_base 48: mod_base = OTHER; note = 2'-fluorouridine
  modified_base 49: mod_base = OTHER; note = 2'-Omethylcytosine
  modified_base 50: mod_base = OTHER; note = 2'-Omethylcytosine
  modified_base 54: mod_base = OTHER; note = 2'-Omethyluridine phosphorothiorate
  modified_base 55: mod_base = OTHER; note = Uridine phosphorothiorate
  modified_base 56: mod_base = OTHER; note = 2'-Omethylcytosine
  modified_base 57: mod_base = OTHER; note = 2'-fluoroguanosine
  modified_base 61: mod_base = OTHER; note = 2'-Omethylcytosine
  modified_base 62: mod_base = OTHER; note = 2'-Omethylcytosine
  modified_base 63: mod_base = OTHER; note = 2'-fluorocytosine
  modified_base 64: mod_base = OTHER; note = 2'-Omethylguanosine
  modified_base 65: mod_base = OTHER; note = 2'-Omethylguanosine
  modified_base 66: mod_base = OTHER; note = 2'-Omethylcytosine
  modified_base 67: mod_base = OTHER; note = 2'-Omethylguanosine
  modified_base 68: mod_base = OTHER; note = 2'-Omethylguanosine
  modified_base 69: mod_base = OTHER; note = 2'-fluoroadenosine

SEQ ID NO: 9084 - RNA, 85 nt, synthetic construct; identical to SEQ ID NO: 3288
  source 1..85: mol_type = other RNA
  modified_base 1: mod_base = OTHER; note = 2'-Omethylcytosine
  modified_base 16: mod_base = OTHER; note = Guanosine phosphorothiorate
  modified_base 28: mod_base = OTHER; note = 2'-fluoroguanosine
  modified_base 34: mod_base = OTHER; note = 2'-fluorocytosine
  modified_base 36: mod_base = OTHER; note = Guanosine phosphorothiorate
  modified_base 42: mod_base = OTHER; note = Adenosine phosphorothiorate
  modified_base 53: mod_base = OTHER; note = 2'-fluorouridine
  modified_base 65: mod_base = OTHER; note = Cytosine phosphorothiorate
  modified_base 83: mod_base = OTHER; note = Cytosine phosphorothiorate
  modified_base 84: mod_base = OTHER; note = 2'-fluorocytosine phosphorothiorate

SEQ ID NO: 9085 - RNA, 86 nt, synthetic construct; identical to SEQ ID NO: 3290
  source 1..86: mol_type = other RNA
  modified_base 1: mod_base = OTHER; note = 2'-Omethyladenosine phosphorothiorate
  modified_base 2: mod_base = OTHER; note = 2'-Omethylcytosine phosphorothiorate
  modified_base 3: mod_base = OTHER; note = 2'-Omethylcytosine
  modified_base 4: mod_base = OTHER; note = 2'-Omethyladenosine
  modified_base 5: mod_base = OTHER; note = 2'-Omethylguanosine
  modified_base 6: mod_base = OTHER; note = 2'-Omethylguanosine
  modified_base 10: mod_base = OTHER; note = 2'-Omethylguanosine
  modified_base 11: mod_base = OTHER; note = 2'-Omethylcytosine
  modified_base 12: mod_base = OTHER; note = 2'-Omethylcytosine
  modified_base 13: mod_base = OTHER; note = 2'-Omethylguanosine
  modified_base 14: mod_base = OTHER; note = 2'-Omethyladenosine
  modified_base 15: mod_base = OTHER; note = 2'-fluoroguanosine
  modified_base 16: mod_base = OTHER; note = 2'-Omethyluridine
  modified_base 17: mod_base = OTHER; note = 2'-Omethylguanosine
  modified_base 18: mod_base = OTHER; note = 2'-Omethylguanosine
  modified_base 19: mod_base = OTHER; note = 2'-fluorouridine
  modified_base 20: mod_base = OTHER; note = 2'-Omethyluridine
  modified_base 22: mod_base = OTHER; note = 2'-Omethyladenosine
  modified_base 23: mod_base = OTHER; note = 2'-Omethylguanosine
  modified_base 24: mod_base = OTHER; note = 2'-Omethylguanosine
  modified_base 25: mod_base = OTHER; note = 2'-Omethylcytosine
  modified_base 33: mod_base = OTHER; note = 2'-fluorouridine
  modified_base 35: mod_base = OTHER; note = Cytosine phosphorothiorate
  modified_base 37: mod_base = OTHER; note = Guanosine phosphorothiorate
  modified_base 38: mod_base = OTHER; note = Adenosine phosphorothiorate
  modified_base 44: mod_base = OTHER; note = 2'-Omethyluridine
  modified_base 57: mod_base = OTHER; note = 2'-fluoroguanosine
  modified_base 58: mod_base = OTHER; note = 2'-fluorocytosine
  modified_base 66: mod_base = OTHER; note = 2'-Omethylcytosine
  modified_base 69: mod_base = OTHER; note = 2'-Omethyladenosine
  modified_base 71: mod_base = OTHER; note = 2'-Omethylcytosine
  modified_base 72: mod_base = OTHER; note = 2'-Omethylcytosine
  modified_base 73: mod_base = OTHER; note = 2'-fluorocytosine
  modified_base 74: mod_base = OTHER; note = 2'-Omethyladenosine
  modified_base 75: mod_base = OTHER; note = 2'-Omethylcytosine
  modified_base 76: mod_base = OTHER; note = 2'-Omethyluridine
  modified_base 77: mod_base = OTHER; note = 2'-Omethylcytosine
  modified_base 78: mod_base = OTHER; note = 2'-Omethylcytosine
  modified_base 83: mod_base = OTHER; note = 2'-Omethyladenosine

SEQ ID NO: 9086 - RNA, 85 nt, synthetic construct; identical to SEQ ID NO: 3310
  source 1..85: mol_type = other RNA
  modified_base 3: mod_base = OTHER; note = 2'-Omethyladenosine
  modified_base 44: mod_base = OTHER; note = 2'-Omethylguanosine
  modified_base 47: mod_base = OTHER; note = 2'-Omethylcytosine
  modified_base 52: mod_base = OTHER; note = Guanosine phosphorothiorate
  modified_base 64: mod_base = OTHER; note = Uridine phosphorothiorate
  modified_base 84: mod_base = OTHER; note = 2'-Omethylcytosine
  modified_base 85: mod_base = OTHER; note = 2'-Omethyladenosine

SEQ ID NO: 9087 - RNA, 76 nt, synthetic construct; identical to SEQ ID NO: 3289
  source 1..76: mol_type = other RNA
  modified_base 1: mod_base = OTHER; note = 2'-Omethylguanosine phosphorothiorate
  modified_base 2: mod_base = OTHER; note = 2'-Omethylcytosine phosphorothiorate
  modified_base 3: mod_base = OTHER; note = 2'-Omethylcytosine
  modified_base 4: mod_base = OTHER; note = 2'-Omethyluridine
  modified_base 5: mod_base = OTHER; note = 2'-Omethylguanosine
  modified_base 6: mod_base = OTHER; note = 2'-Omethylguanosine
  modified_base 10: mod_base = OTHER; note = 2'-Omethylguanosine
  modified_base 11: mod_base = OTHER; note = 2'-Omethylcytosine
  modified_base 12: mod_base = OTHER; note = 2'-Omethyluridine
  modified_base 13: mod_base = OTHER; note = 2'-Omethylcytosine
  modified_base 16: mod_base = OTHER; note = 2'-Omethyluridine
  modified_base 18: mod_base = OTHER; note = 2'-Omethylguanosine
  modified_base 19: mod_base = OTHER; note = 2'-Omethylguanosine
  modified_base 33: mod_base = OTHER; note = 2'-fluorouridine
  modified_base 35: mod_base = OTHER; note = Uridine phosphorothiorate
  modified_base 37: mod_base = OTHER; note = Adenosine phosphorothiorate
  modified_base 38: mod_base = OTHER; note = Adenosine phosphorothiorate
  modified_base 44: mod_base = OTHER; note = 2'-Omethylguanosine
  modified_base 45: mod_base = OTHER; note = 2'-Omethylguanosine
  modified_base 46: mod_base = OTHER; note = 2'-fluoroguanosine
  modified_base 47: mod_base = OTHER; note = 2'-fluorouridine
  modified_base 48: mod_base = OTHER; note = 2'-fluorocytosine
  modified_base 49: mod_base = OTHER; note = 2'-Omethylcytosine
  modified_base 50: mod_base = OTHER; note = 2'-Omethyladenosine
  modified_base 51: mod_base = OTHER; note = 2'-Omethylguanosine
  modified_base 52: mod_base = OTHER; note = 2'-Omethylguanosine
  modified_base 53: mod_base = OTHER; note = 2'-Omethylguanosine
  modified_base 54: mod_base = OTHER; note = 2'-Omethyluridine
  modified_base 56: mod_base = OTHER; note = 2'-Omethylcytosine
  modified_base 59: mod_base = OTHER; note = 2'-Omethylguanosine
  modified_base 61: mod_base = OTHER; note = 2'-Omethylcytosine
  modified_base 62: mod_base = OTHER; note = 2'-Omethylcytosine
  modified_base 63: mod_base = OTHER; note = 2'-fluorocytosine
  modified_base 64: mod_base = OTHER; note = 2'-Omethyluridine
  modified_base 65: mod_base = OTHER; note = 2'-Omethylguanosine
  modified_base 66: mod_base = OTHER; note = 2'-Omethyluridine
  modified_base 67: mod_base = OTHER; note = 2'-Omethylcytosine
  modified_base 68: mod_base = OTHER; note = 2'-Omethylcytosine
  modified_base 73: mod_base = OTHER; note = 2'-Omethylguanosine

SEQ ID NO: 9088 - RNA, 76 nt, synthetic construct; identical to SEQ ID NO: 625
  source 1..76: mol_type = other RNA
  modified_base 1: mod_base = OTHER; note = 2'-Omethylguanosine phosphorothiorate
  modified_base 2: mod_base = OTHER; note = 2'-Omethylguanosine phosphorothiorate
  modified_base 3: mod_base = OTHER; note = 2'-Omethylcytosine
  modified_base 4: mod_base = OTHER; note = 2'-Omethyluridine
  modified_base 5: mod_base = OTHER; note = 2'-Omethylcytosine
  modified_base 6: mod_base = OTHER; note = 2'-Omethylcytosine
  modified_base 10: mod_base = OTHER; note = 2'-Omethylguanosine
  modified_base 11: mod_base = OTHER; note = 2'-Omethylcytosine
  modified_base 12: mod_base = OTHER; note = 2'-Omethylguanosine
  modified_base 13: mod_base = OTHER; note = 2'-Omethylcytosine
  modified_base 14: mod_base = OTHER; note = 2'-Omethyladenosine
  modified_base 15: mod_base = OTHER; note = 2'-Omethyladenosine
  modified_base 16: mod_base = OTHER; note = 2'-Omethyluridine
  modified_base 17: mod_base = OTHER; note = 2'-Omethylguanosine
  modified_base 18: mod_base = OTHER; note = 2'-Omethylguanosine
  modified_base 20: mod_base = OTHER; note = 2'-Omethyluridine
  modified_base 22: mod_base = OTHER; note = 2'-Omethylguanosine
  modified_base 23: mod_base = OTHER; note = 2'-Omethylcytosine
  modified_base 24: mod_base = OTHER; note = 2'-Omethylguanosine
  modified_base 25: mod_base = OTHER; note = 2'-Omethylcytosine
  modified_base 33: mod_base = OTHER; note = 2'-fluorouridine
  modified_base 35: mod_base = OTHER; note = Cytosine phosphorothiorate
  modified_base 37: mod_base = OTHER; note = Adenosine phosphorothiorate
  modified_base 38: mod_base = OTHER; note = Adenosine phosphorothiorate
  modified_base 41: mod_base = OTHER; note = 2'-fluorocytosine
  modified_base 42: mod_base = OTHER; note = 2'-Omethyladenosine
  modified_base 43: mod_base = OTHER; note = 2'-Omethyladenosine
  modified_base 44: mod_base = OTHER; note = 2'-fluoroadenosine
  modified_base 49: mod_base = OTHER; note = 2'-Omethylcytosine
  modified_base 50: mod_base = OTHER; note = 2'-Omethylcytosine
  modified_base 52: mod_base = OTHER; note = 2'-Omethylguanosine
  modified_base 54: mod_base = OTHER; note = 2'-Omethyluridine
  modified_base 55: mod_base = OTHER; note = Uridine phosphorothiorate
  modified_base 56: mod_base = OTHER; note = 2'-Omethylcytosine
  modified_base 57: mod_base = OTHER; note = 2'-fluoroguanosine
  modified_base 59: mod_base = OTHER; note = 2'-Omethylguanosine
  modified_base 61: mod_base = OTHER; note = 2'-Omethylcytosine
  modified_base 65: mod_base = OTHER; note = 2'-Omethylguanosine
  modified_base 73: mod_base = OTHER; note = 2'-Omethylguanosine

SEQ ID NO: 9089 - RNA, 85 nt, synthetic construct; identical to SEQ ID NO: 3317
  source 1..85: mol_type = other RNA
  modified_base 1: mod_base = OTHER; note = 2'-Omethylguanosine phosphorothiorate
  modified_base 2: mod_base = OTHER; note = 2'-Omethylcytosine phosphorothiorate
  modified_base 8: mod_base = OTHER; note = 2'-fluorouridine
  modified_base 10: mod_base = OTHER; note = 2'-fluoroguanosine
  modified_base 11: mod_base = OTHER; note = 2'-fluorocytosine
  modified_base 16: mod_base = OTHER; note = Uridine phosphorothiorate
  modified_base 19: mod_base = OTHER; note = Uridine phosphorothiorate
  modified_base 24: mod_base = OTHER; note = Guanosine phosphorothiorate
  modified_base 31: mod_base = OTHER; note = Adenosine phosphorothiorate
  modified_base 38: mod_base = OTHER; note = 2'-fluoroadenosine phosphorothiorate
  modified_base 47: mod_base = OTHER; note = 2'-Omethylguanosine
  modified_base 50: mod_base = OTHER; note = Cytosine phosphorothiorate
  modified_base 51: mod_base = OTHER; note = Uridine phosphorothiorate
  modified_base 58: mod_base = OTHER; note = 2'-fluoroguanosine phosphorothiorate
  modified_base 67: mod_base = OTHER; note = Adenosine phosphorothiorate
  modified_base 82: mod_base = OTHER; note = 2'-Omethylguanosine phosphorothiorate

SEQ ID NO: 9090 - RNA, 85 nt, synthetic construct; identical to SEQ ID NO: 3310
  source 1..85: mol_type = other RNA
  modified_base 1: mod_base = OTHER; note = 2'-Omethylcytosine
  modified_base 11: mod_base = OTHER; note = Cytosine phosphorothiorate
  modified_base 26: mod_base = OTHER; note = 2'-fluorouridine
  modified_base 30: mod_base = OTHER; note = 2'-fluoroadenosine
  modified_base 34: mod_base = OTHER; note = 2'-fluorouridine
  modified_base 43: mod_base = OTHER; note = 2'-Omethyluridine
  modified_base 54: mod_base = OTHER; note = 2'-fluorocytosine
  modified_base 61: mod_base = OTHER; note = 2'-Omethylguanosine
  modified_base 71: mod_base = OTHER; note = 2'-fluorocytosine
  modified_base 73: mod_base = OTHER; note = Adenosine phosphorothiorate
  modified_base 84: mod_base = OTHER; note = Cytosine phosphorothiorate

SEQ ID NO: 9091 - RNA, 76 nt, synthetic construct; identical to SEQ ID NO: 625
  source 1..76: mol_type = other RNA
  modified_base 1: mod_base = OTHER; note = 2'-Omethylguanosine phosphorothiorate
  modified_base 2: mod_base = OTHER; note = 2'-Omethylguanosine
  modified_base 3: mod_base = OTHER; note = 2'-Omethylcytosine
  modified_base 4: mod_base = OTHER; note = 2'-Omethyluridine
  modified_base 5: mod_base = OTHER; note = 2'-Omethylcytosine
  modified_base 6: mod_base = OTHER; note = 2'-Omethylcytosine
  modified_base 10: mod_base = OTHER; note = 2'-Omethylguanosine
  modified_base 11: mod_base = OTHER; note = 2'-Omethylcytosine
  modified_base 12: mod_base = OTHER; note = 2'-Omethylguanosine
  modified_base 13: mod_base = OTHER; note = 2'-Omethylcytosine
  modified_base 14: mod_base = OTHER; note = 2'-Omethyladenosine
  modified_base 15: mod_base = OTHER; note = 2'-Omethyladenosine
  modified_base 16: mod_base = OTHER; note = 2'-Omethyluridine
  modified_base 17: mod_base = OTHER; note = 2'-Omethylguanosine
  modified_base 18: mod_base = OTHER; note = 2'-Omethylguanosine
  modified_base 19: mod_base = OTHER; note = 2'-Omethyladenosine
  modified_base 20: mod_base = OTHER; note = 2'-Omethyluridine
  modified_base 22: mod_base = OTHER; note = 2'-Omethylguanosine
  modified_base 23: mod_base = OTHER; note = 2'-Omethylcytosine
  modified_base 24: mod_base = OTHER; note = 2'-Omethylguanosine
  modified_base 25: mod_base = OTHER; note = 2'-Omethylcytosine
  modified_base 40: mod_base = OTHER; note = 2'-fluorouridine
  modified_base 41: mod_base = OTHER; note = 2'-fluorocytosine
  modified_base 42: mod_base = OTHER; note = 2'-fluoroadenosine
  modified_base 43: mod_base = OTHER; note = 2'-fluoroadenosine
  modified_base 44: mod_base = OTHER; note = 2'-Omethyladenosine
  modified_base 45: mod_base = OTHER; note = 2'-Omethylguanosine
  modified_base 46: mod_base = OTHER; note = 2'-Omethylguanosine
  modified_base 49: mod_base = OTHER; note = 2'-Omethylcytosine
  modified_base 50: mod_base = OTHER; note = 2'-Omethylcytosine
  modified_base 51: mod_base = OTHER; note = 2'-Omethylguanosine
  modified_base 52: mod_base = OTHER; note = 2'-Omethylguanosine
  modified_base 53: mod_base = OTHER; note = 2'-Omethylguanosine
  modified_base 54: mod_base = OTHER; note = Uridine phosphorothiorate
  modified_base 55: mod_base = OTHER; note = Uridine phosphorothiorate
  modified_base 56: mod_base = OTHER; note = Cytosine phosphorothiorate
  modified_base 57: mod_base = OTHER; note = Guanosine phosphorothiorate
  modified_base 61: mod_base = OTHER; note = 2'-Omethylcytosine
  modified_base 62: mod_base = OTHER; note = 2'-Omethylcytosine
  modified_base 63: mod_base = OTHER; note = 2'-fluorocytosine
  modified_base 64: mod_base = OTHER; note = 2'-Omethylguanosine
  modified_base 65: mod_base = OTHER; note = 2'-Omethylguanosine
  modified_base 66: mod_base = OTHER; note = 2'-Omethylcytosine
  modified_base 67: mod_base = OTHER; note = 2'-Omethylguanosine
  modified_base 68: mod_base = OTHER; note = 2'-Omethylguanosine
  modified_base 69: mod_base = OTHER; note = 2'-fluoroadenosine
  modified_base 70: mod_base = OTHER; note = 2'-fluoroguanosine

SEQ ID NO: 9092 - DNA, 73 bp, synthetic construct; identical to SEQ ID NO: 3380
  source 1..73: mol_type = other DNA
  modified_base 1: mod_base = OTHER; note = 2'-Omethylguanosine phosphorothiorate
  modified_base 2: mod_base = OTHER; note = 2'-Omethylguanosine phosphorothiorate
  modified_base 52: mod_base = OTHER; note = 2'-Omethylguanosine
  modified_base 63: mod_base = OTHER; note = Cytosine phosphorothiorate
  modified_base 70: mod_base = OTHER; note = Guanosine phosphorothiorate
  modified_base 71: mod_base = OTHER; note = 2'-Omethyluridine phosphorothiorate
  modified_base 72: mod_base = OTHER; note = 2'-Omethylcytosine
  misc_feature 1..63: note = RNA
  misc_feature 64: note = DNA
  misc_feature 65..73: note = RNA

SEQ ID NO: 9093 - RNA, 86 nt, synthetic construct; identical to SEQ ID NO: 3290
  source 1..86: mol_type = other RNA
  modified_base 1: mod_base = OTHER; note = 2'-Omethyladenosine phosphorothiorate

SEQ ID NO: 9094 - RNA, 85 nt, synthetic construct; identical to SEQ ID NO: 3301
  source 1..85: mol_type = other RNA
  modified_base 1: mod_base = OTHER; note = 2'-Omethylguanosine phosphorothiorate
  modified_base 2: mod_base = OTHER; note = 2'-Omethylcytosine
  modified_base 3: mod_base = OTHER; note = 2'-Omethyluridine phosphorothiorate
  modified_base 10: mod_base = OTHER; note = 2'-fluoroguanosine
  modified_base 11: mod_base = OTHER; note = 2'-fluorocytosine
  modified_base 17: mod_base = OTHER; note = Guanosine phosphorothiorate
  modified_base 20: mod_base = OTHER; note = 2'-Omethyluridine phosphorothiorate
  modified_base 24: mod_base = OTHER; note = 2'-Omethylguanosine phosphorothiorate
  modified_base 34: mod_base = OTHER; note = 2'-fluorouridine
  modified_base 35: mod_base = OTHER; note = 2'-fluorouridine
  modified_base 36: mod_base = OTHER; note = 2'-Omethyladenosine
  modified_base 38: mod_base = OTHER; note = 2'-fluoroadenosine phosphorothiorate
  modified_base 45: mod_base = OTHER; note = Guanosine phosphorothiorate
  modified_base 48: mod_base = OTHER; note = 2'-Omethylguanosine phosphorothiorate
  modified_base 50: mod_base = OTHER; note = 2'-Omethylcytosine
  modified_base 51: mod_base = OTHER; note = 2'-Omethyluridine phosphorothiorate
  modified_base 61: mod_base = OTHER; note = 2'-Omethylguanosine
  modified_base 71: mod_base = OTHER; note = Cytosine phosphorothiorate
  modified_base 73: mod_base = OTHER; note = 2'-fluoroguanosine
  modified_base 82: mod_base = OTHER; note = 2'-Omethylguanosine

SEQ ID NO: 9095 - RNA, 75 nt, synthetic construct; identical to SEQ ID NO: 3336
  source 1..75: mol_type = other RNA
  modified_base 19: mod_base = OTHER; note = 2'-fluorouridine
  modified_base 37: mod_base = OTHER; note = Adenosine phosphorothiorate
  modified_base 40: mod_base = OTHER; note = 2'-fluorouridine
  modified_base 46: mod_base = OTHER; note = 2'-fluorouridine
  modified_base 47: mod_base = OTHER; note = 2'-fluorocytosine
  modified_base 57: mod_base = OTHER; note = 2'-Omethyladenosine
  modified_base 62: mod_base = OTHER; note = 2'-fluorocytosine
  modified_base 73: mod_base = OTHER; note = Cytosine phosphorothiorate
  modified_base 74: mod_base = OTHER; note = Cytosine phosphorothiorate

SEQ ID NO: 9096 - RNA, 76 nt, synthetic construct; identical to SEQ ID NO: 3289
  source 1..76: mol_type = other RNA
  modified_base 1: mod_base = OTHER; note = 2'-Omethylguanosine phosphorothiorate
  modified_base 2: mod_base = OTHER; note = Cytosine phosphorothiorate
  modified_base 75: mod_base = OTHER; note = 2'-Omethylcytosine phosphorothiorate

SEQ ID NO: 9097 - RNA, 76 nt, synthetic construct; identical to SEQ ID NO: 625
  source 1..76: mol_type = other RNA
  modified_base 1: mod_base = OTHER; note = 2'-Omethylguanosine
  modified_base 2: mod_base = OTHER; note = 2'-Omethylguanosine
  modified_base 6: mod_base = OTHER; note = 2'-fluorocytosine
  modified_base 8: mod_base = OTHER; note = Uridine phosphorothiorate
  modified_base 13: mod_base = OTHER; note = 2'-Omethylcytosine
  modified_base 16: mod_base = OTHER; note = 2'-Omethyluridine
  modified_base 17: mod_base = OTHER; note = 2'-Omethylguanosine
  modified_base 18: mod_base = OTHER; note = 2'-Omethylguanosine
  modified_base 23: mod_base = OTHER; note = 2'-Omethylcytosine
  modified_base 25: mod_base = OTHER; note = Cytosine phosphorothiorate
  modified_base 27: mod_base = OTHER; note = 2'-fluorouridine
  modified_base 29: mod_base = OTHER; note = Guanosine phosphorothiorate
  modified_base 30: mod_base = OTHER; note = 2'-fluoroguanosine phosphorothiorate
  modified_base 34: mod_base = OTHER; note = 2'-Omethyluridine
  modified_base 38: mod_base = OTHER; note = 2'-fluoroadenosine
  modified_base 39: mod_base = OTHER; note = 2'-Omethyluridine
  modified_base 41: mod_base = OTHER; note = 2'-fluorocytosine
  modified_base 42: mod_base = OTHER; note = 2'-Omethyladenosine
  modified_base 43: mod_base = OTHER; note = 2'-Omethyladenosine
  modified_base 44: mod_base = OTHER; note = 2'-Omethyladenosine phosphorothiorate
  modified_base 46: mod_base = OTHER; note = 2'-fluoroguanosine
  modified_base 52: mod_base = OTHER; note = 2'-fluoroguanosine
  modified_base 54: mod_base = OTHER; note = 2'-fluorouridine
  modified_base 55: mod_base = OTHER; note = Uridine phosphorothiorate
  modified_base 58: mod_base = OTHER; note = 2'-fluoroadenosine phosphorothiorate
  modified_base 59: mod_base = OTHER; note = 2'-fluoroguanosine
  modified_base 61: mod_base = OTHER; note = Cytosine phosphorothiorate
  modified_base 62: mod_base = OTHER; note = 2'-fluorocytosine
  modified_base 65: mod_base = OTHER; note = Guanosine phosphorothiorate
  modified_base 66: mod_base = OTHER; note = 2'-fluorocytosine
  modified_base 71: mod_base = OTHER; note = 2'-fluorouridine phosphorothiorate
  modified_base 72: mod_base = OTHER; note = 2'-Omethylcytosine
  modified_base 74: mod_base = OTHER; note = 2'-fluorocytosine

SEQ ID NO: 9098 - RNA, 76 nt, synthetic construct; identical to SEQ ID NO: 625
  source 1..76: mol_type = other RNA
  modified_base 1: mod_base = OTHER; note = 2'-Omethylguanosine
  modified_base 2: mod_base = OTHER; note = 2'-Omethylguanosine
  modified_base 13: mod_base = OTHER; note = 2'-Omethylcytosine
  modified_base 33: mod_base = OTHER; note = 2'-fluorouridine
  modified_base 37: mod_base = OTHER; note = Adenosine phosphorothiorate
  modified_base 52: mod_base = OTHER; note = 2'-Omethylguanosine
  modified_base 56: mod_base = OTHER; note = 2'-Omethylcytosine
  modified_base 63: mod_base = OTHER; note = 2'-fluorocytosine
  modified_base 73: mod_base = OTHER; note = 2'-Omethylguanosine
  modified_base 75: mod_base = OTHER; note = 2'-fluorocytosine phosphorothiorate

SEQ ID NO: 9099 - RNA, 85 nt, synthetic construct; identical to SEQ ID NO: 3297
  source 1..85: mol_type = other RNA
  modified_base 1: mod_base = OTHER; note = 2'-Omethylguanosine
  modified_base 18: mod_base = OTHER; note = 2'-Omethylguanosine

SEQ ID NO: 9100 - RNA, 85 nt, synthetic construct; identical to SEQ ID NO: 3317
  source 1..85: mol_type = other RNA
  modified_base 1: mod_base = OTHER; note = 2'-Omethylguanosine phosphorothiorate
  modified_base 3: mod_base = OTHER; note = Uridine phosphorothiorate
  modified_base 4: mod_base = OTHER; note = 2'-Omethylguanosine phosphorothiorate
  modified_base 10: mod_base = OTHER; note = 2'-fluoroguanosine
  modified_base 12: mod_base = OTHER; note = 2'-fluorocytosine
  modified_base 14: mod_base = OTHER; note = 2'-fluoroadenosine phosphorothiorate
  modified_base 20: mod_base = OTHER; note = Uridine phosphorothiorate
  modified_base 22: mod_base = OTHER; note = Adenosine phosphorothiorate
  modified_base 35: mod_base = OTHER; note = 2'-fluorouridine
  modified_base 39: mod_base = OTHER; note = 2'-fluorouridine phosphorothiorate
  modified_base 41: mod_base = OTHER; note = Cytosine phosphorothiorate
  modified_base 42: mod_base = OTHER; note = 2'-fluoroadenosine
  modified_base 48: mod_base = OTHER; note = 2'-Omethylguanosine
  modified_base 50: mod_base = OTHER; note = 2'-Omethylcytosine
  modified_base 61: mod_base = OTHER; note = Guanosine phosphorothiorate
  modified_base 71: mod_base = OTHER; note = Cytosine phosphorothiorate
  modified_base 72: mod_base = OTHER; note = 2'-fluorouridine
  modified_base 78: mod_base = OTHER; note = 2'-fluorocytosine
  modified_base 81: mod_base = OTHER; note = 2'-fluorocytosine phosphorothiorate

SEQ ID NO: 9101 - RNA, 76 nt, synthetic construct
  source 1..76: mol_type = other RNA
ggctccgtggcgcaatggatagcgcattggactgattattcaaaggttccgggttcgagtcccggcggagtcgcca

SEQ ID NO: 9102 - RNA, 75 nt, synthetic construct; identical to SEQ ID NO: 1045
  source 1..75: mol_type = other RNA
  modified_base 1: mod_base = OTHER; note = 2'-Omethylguanosine
  modified_base 2: mod_base = OTHER; note = 2'-Omethylguanosine
  modified_base 3: mod_base = OTHER; note = 2'-Omethyluridine
  modified_base 4: mod_base = OTHER; note = 2'-Omethyluridine
  modified_base 5: mod_base = OTHER; note = 2'-Omethylcytosine
  modified_base 6: mod_base = OTHER; note = 2'-Omethylcytosine
  modified_base 14: mod_base = OTHER; note = 2'-Omethyladenosine
  modified_base 15: mod_base = OTHER; note = 2'-fluoroadenosine
  modified_base 16: mod_base = OTHER; note = 2'-Omethyluridine
  modified_base 17: mod_base = OTHER; note = 2'-Omethylguanosine
  modified_base 18: mod_base = OTHER; note = 2'-Omethylguanosine
  modified_base 19: mod_base = OTHER; note = 2'-fluorouridine
  modified_base 20: mod_base = OTHER; note = 2'-Omethyladenosine
  modified_base 25: mod_base = OTHER; note = 2'-Omethylcytosine
  modified_base 33: mod_base = OTHER; note = 2'-fluorouridine
  modified_base 35: mod_base = OTHER; note = Uridine phosphorothiorate
  modified_base 37: mod_base = OTHER; note = Adenosine phosphorothiorate
  modified_base 38: mod_base = OTHER; note = Adenosine phosphorothiorate
  modified_base 41: mod_base = OTHER; note = 2'-Omethylcytosine
  modified_base 42: mod_base = OTHER; note = 2'-Omethyladenosine
  modified_base 43: mod_base = OTHER; note = 2'-Omethylguanosine
  modified_base 44: mod_base = OTHER; note = 2'-Omethylcytosine
  modified_base 48: mod_base = OTHER; note = 2'-Omethylcytosine
  modified_base 49: mod_base = OTHER; note = 2'-Omethylcytosine
  modified_base 51: mod_base = OTHER; note = 2'-Omethyladenosine
  modified_base 53: mod_base = OTHER; note = 2'-Omethyluridine
  modified_base 54: mod_base = OTHER; note = Uridine phosphorothiorate
  modified_base 55: mod_base = OTHER; note = 2'-Omethylcytosine
  modified_base 56: mod_base = OTHER; note = 2'-fluoroguanosine
  modified_base 58: mod_base = OTHER; note = 2'-Omethylguanosine
  modified_base 60: mod_base = OTHER; note = 2'-Omethylcytosine
  modified_base 64: mod_base = OTHER; note = 2'-Omethylguanosine
  modified_base 72: mod_base = OTHER; note = 2'-Omethyluridine

SEQ ID NO: 9103 - RNA, 76 nt, synthetic construct; identical to SEQ ID NO: 3318
  source 1..76: mol_type = other RNA
  modified_base 1: mod_base = OTHER; note = 2'-Omethylcytosine
  modified_base 2: mod_base = OTHER; note = 2'-Omethylcytosine
  modified_base 3: mod_base = OTHER; note = 2'-Omethyluridine
  modified_base 4: mod_base = OTHER; note = 2'-Omethyluridine
  modified_base 5: mod_base = OTHER; note = 2'-Omethylcytosine
  modified_base 6: mod_base = OTHER; note = 2'-Omethylguanosine
  modified_base 22: mod_base = OTHER; note = 2'-Omethylguanosine
  modified_base 23: mod_base = OTHER; note = 2'-Omethyladenosine
  modified_base 24: mod_base = OTHER; note = 2'-Omethylguanosine
  modified_base 25: mod_base = OTHER; note = 2'-Omethylcytosine
  modified_base 49: mod_base = OTHER; note = 2'-Omethylguanosine
  modified_base 50: mod_base = OTHER; note = 2'-Omethylcytosine
  modified_base 51: mod_base = OTHER; note = 2'-Omethyluridine
  modified_base 52: mod_base = OTHER; note = 2'-Omethylguanosine
  modified_base 53: mod_base = OTHER; note = 2'-Omethylguanosine

SEQ ID NO: 9104 - RNA, 86 nt, synthetic construct; identical to SEQ ID NO: 3290
  source 1..86: mol_type = other RNA
  modified_base 1: mod_base = OTHER; note = 2'-Omethyladenosine
  modified_base 33: mod_base = OTHER; note = 2'-fluorouridine
  modified_base 35: mod_base = OTHER; note = Cytosine phosphorothiorate
  modified_base 37: mod_base = OTHER; note = Guanosine phosphorothiorate
  modified_base 38: mod_base = OTHER; note = Adenosine phosphorothiorate
  modified_base 83: mod_base = OTHER; note = 2'-Omethyladenosine

SEQ ID NO: 9105 - RNA, 75 nt, synthetic construct; identical to SEQ ID NO: 3336
  source 1..75: mol_type = other RNA
  modified_base 8: mod_base = OTHER; note = 2'-fluoroadenosine
  modified_base 16: mod_base = OTHER; note = 2'-fluorocytosine
  modified_base 21: mod_base = OTHER; note = Guanosine phosphorothiorate
  modified_base 26: mod_base = OTHER; note = 2'-fluorouridine
  modified_base 27: mod_base = OTHER; note = Cytosine phosphorothiorate
  modified_base 37: mod_base = OTHER; note = Adenosine phosphorothiorate
  modified_base 40: mod_base = OTHER; note = 2'-fluorouridine
  modified_base 41: mod_base = OTHER; note = Guanosine phosphorothiorate
  modified_base 45: mod_base = OTHER; note = 2'-Omethylguanosine phosphorothiorate
  modified_base 50: mod_base = OTHER; note = 2'-fluoroguanosine
  modified_base 54: mod_base = OTHER; note = 2'-fluorouridine
  modified_base 59: mod_base = OTHER; note = 2'-Omethyluridine phosphorothiorate
  modified_base 63: mod_base = OTHER; note = 2'-fluorouridine phosphorothiorate
  modified_base 71: mod_base = OTHER; note = 2'-fluorocytosine
  modified_base 74: mod_base = OTHER; note = Cytosine phosphorothiorate

SEQ ID NO: 9106 - RNA, 85 nt, synthetic construct; identical to SEQ ID NO: 3288
  source 1..85: mol_type = other RNA
  modified_base 1: mod_base = OTHER; note = 2'-fluorocytosine phosphorothiorate
  modified_base 2: mod_base = OTHER; note = 2'-Omethylcytosine
  modified_base 11: mod_base = OTHER; note = Cytosine phosphorothiorate
  modified_base 30: mod_base = OTHER; note = 2'-fluoroadenosine
  modified_base 49: mod_base = OTHER; note = 2'-fluorouridine
  modified_base 57: mod_base = OTHER; note = 2'-Omethylcytosine
  modified_base 84: mod_base = OTHER; note = Cytosine phosphorothiorate

SEQ ID NO: 9107 - RNA, 76 nt, synthetic construct; identical to SEQ ID NO: 625
  source 1..76: mol_type = other RNA
  modified_base 3: mod_base = OTHER; note = Cytosine phosphorothiorate
  modified_base 4: mod_base = OTHER; note = 2'-Omethyluridine
  modified_base 6: mod_base = OTHER; note = 2'-fluorocytosine phosphorothiorate
  modified_base 11: mod_base = OTHER; note = 2'-Omethylcytosine
  modified_base 14: mod_base = OTHER; note = 2'-fluoroadenosine
  modified_base 16: mod_base = OTHER; note = 2'-Omethyluridine phosphorothiorate
  modified_base 17: mod_base = OTHER; note = 2'-Omethylguanosine
  modified_base 18: mod_base = OTHER; note = 2'-fluoroguanosine
  modified_base 23: mod_base = OTHER; note = Cytosine phosphorothiorate
  modified_base 24: mod_base = OTHER; note = 2'-Omethylguanosine
  modified_base 25: mod_base = OTHER; note = 2'-fluorocytosine
  modified_base 26: mod_base = OTHER; note = 2'-fluoroadenosine phosphorothiorate
  modified_base 27: mod_base = OTHER; note = 2'-fluorouridine
  modified_base 28: mod_base = OTHER; note = 2'-fluorouridine phosphorothiorate
  modified_base 29: mod_base = OTHER; note = 2'-Omethylguanosine
  modified_base 30: mod_base = OTHER; note = 2'-fluoroguanosine
  modified_base 31: mod_base = OTHER; note = 2'-fluoroadenosine
  modified_base 34: mod_base = OTHER; note = 2'-fluorouridine
  modified_base 38: mod_base = OTHER; note = Adenosine phosphorothiorate
  modified_base 39: mod_base = OTHER; note = 2'-Omethyluridine
  modified_base 40: mod_base = OTHER; note = 2'-Omethyluridine
  modified_base 44: mod_base = OTHER; note = Adenosine phosphorothiorate
  modified_base 45: mod_base = OTHER; note = 2'-fluoroguanosine
  modified_base 46: mod_base = OTHER; note = 2'-Omethylguanosine
  modified_base 48: mod_base = OTHER; note = 2'-fluorouridine phosphorothiorate
  modified_base 49: mod_base = OTHER; note = 2'-fluorocytosine
  modified_base 50: mod_base = OTHER; note = 2'-Omethylcytosine phosphorothiorate
  modified_base 52: mod_base = OTHER; note = Guanosine phosphorothiorate
  modified_base 54: mod_base = OTHER; note = 2'-Omethyluridine
  modified_base 59: mod_base = OTHER; note = 2'-fluoroguanosine
  modified_base 64: mod_base = OTHER; note = 2'-fluoroguanosine
  modified_base 69: mod_base = OTHER; note = 2'-Omethyladenosine
  modified_base 70: mod_base = OTHER; note = 2'-Omethylguanosine phosphorothiorate
  modified_base 71: mod_base = OTHER; note = 2'-fluorouridine
  modified_base 72: mod_base = OTHER; note = 2'-fluorocytosine
  modified_base 74: mod_base = OTHER; note = 2'-fluorocytosine phosphorothiorate
  modified_base 75: mod_base = OTHER; note = 2'-Omethylcytosine

SEQ ID NO: 9108 - RNA, 76 nt, synthetic construct; identical to SEQ ID NO: 3325
  source 1..76: mol_type = other RNA
  modified_base 1: mod_base = OTHER; note = 2'-Omethyluridine
  modified_base 2: mod_base = OTHER; note = 2'-Omethyladenosine
  modified_base 3: mod_base = OTHER; note = 2'-Omethylcytosine
  modified_base 4: mod_base = OTHER; note = 2'-Omethyladenosine
  modified_base 5: mod_base = OTHER; note = 2'-Omethylcytosine
  modified_base 6: mod_base = OTHER; note = 2'-Omethylcytosine
  modified_base 14: mod_base = OTHER; note = 2'-Omethyladenosine
  modified_base 15: mod_base = OTHER; note = 2'-Omethyladenosine
  modified_base 16: mod_base = OTHER; note = 2'-Omethyluridine
  modified_base 17: mod_base = OTHER; note = 2'-Omethylguanosine
  modified_base 18: mod_base = OTHER; note = 2'-Omethylguanosine
  modified_base 20: mod_base = OTHER; note = 2'-Omethyluridine
  modified_base 25: mod_base = OTHER; note = 2'-Omethylcytosine
  modified_base 33: mod_base = OTHER; note = 2'-fluorouridine
  modified_base 35: mod_base = OTHER; note = Cytosine phosphorothiorate
  modified_base 37: mod_base = OTHER; note = Adenosine phosphorothiorate
  modified_base 38: mod_base = OTHER; note = Adenosine phosphorothiorate
  modified_base 41: mod_base = OTHER; note = 2'-Omethylcytosine
  modified_base 42: mod_base = OTHER; note = 2'-Omethyladenosine
  modified_base 43: mod_base = OTHER; note = 2'-Omethyladenosine
  modified_base 44: mod_base = OTHER; note = 2'-fluoroadenosine
  modified_base 49: mod_base = OTHER; note = 2'-Omethylcytosine
  modified_base 50: mod_base = OTHER; note = 2'-Omethylcytosine
  modified_base 52: mod_base = OTHER; note = 2'-Omethylguanosine
  modified_base 54: mod_base = OTHER; note = 2'-Omethyluridine
  modified_base 55: mod_base = OTHER; note = Uridine phosphorothiorate
  modified_base 56: mod_base = OTHER; note = 2'-Omethylcytosine
  modified_base 57: mod_base = OTHER; note = 2'-fluoroguanosine
  modified_base 59: mod_base = OTHER; note = 2'-Omethylguanosine
  modified_base 61: mod_base = OTHER; note = 2'-Omethylcytosine
  modified_base 65: mod_base = OTHER; note = 2'-Omethylguanosine
  modified_base 73: mod_base = OTHER; note = 2'-Omethylguanosine

SEQ ID NO: 9109 - RNA, 74 nt, synthetic construct; identical to SEQ ID NO: 766
  source 1..74: mol_type = other RNA
  modified_base 1: mod_base = OTHER; note = 2'-Omethylguanosine phosphorothiorate
  modified_base 2: mod_base = OTHER; note = 2'-Omethylguanosine phosphorothiorate
  modified_base 43: mod_base = OTHER; note = Adenosine phosphorothiorate
  modified_base 55: mod_base = OTHER; note = Uridine phosphorothiorate
  modified_base 73: mod_base = OTHER; note = 2'-Omethylguanosine

SEQ ID NO: 9110 - RNA, 76 nt, synthetic construct; identical to SEQ ID NO: 3318
  source 1..76: mol_type = other RNA
  modified_base 1: mod_base = OTHER; note = 2'-Omethylcytosine phosphorothiorate
  modified_base 2: mod_base = OTHER; note = 2'-Omethylcytosine
  modified_base 46: mod_base = OTHER; note = 2'-fluoroguanosine
  modified_base 59: mod_base = OTHER; note = 2'-Omethyladenosine
  modified_base 75: mod_base = OTHER; note = Cytosine phosphorothiorate
  modified_base 76: mod_base = OTHER; note = 2'-Omethyladenosine

SEQ ID NO: 9111 - RNA, 75 nt, synthetic construct; identical to SEQ ID NO: 3336
  source 1..75: mol_type = other RNA
  modified_base 1: mod_base = OTHER; note = 2'-Omethylcytosine phosphorothiorate
  modified_base 3: mod_base = OTHER; note = 2'-fluorouridine
  modified_base 9: mod_base = OTHER; note = 2'-fluoroguanosine phosphorothiorate
  modified_base 15: mod_base = OTHER; note = Uridine phosphorothiorate
  modified_base 16: mod_base = OTHER; note = 2'-fluorocytosine
  modified_base 18: mod_base = OTHER; note = 2'-fluoroguanosine
  modified_base 20: mod_base = OTHER; note = 2'-fluoroadenosine phosphorothiorate
  modified_base 21: mod_base = OTHER; note = 2'-Omethylguanosine phosphorothiorate
  modified_base 26: mod_base = OTHER; note = Uridine phosphorothiorate
  modified_base 28: mod_base = OTHER; note = 2'-fluoroadenosine
  modified_base 29: mod_base = OTHER; note = Guanosine phosphorothiorate
  modified_base 41: mod_base = OTHER; note = 2'-fluoroguanosine
  modified_base 42: mod_base = OTHER; note = 2'-fluoroadenosine phosphorothiorate
  modified_base 46: mod_base = OTHER; note = 2'-fluorouridine
  modified_base 47: mod_base = OTHER; note = 2'-fluorocytosine
  modified_base 54: mod_base = OTHER; note = Uridine phosphorothiorate
  modified_base 58: mod_base = OTHER; note = 2'-Omethylguanosine phosphorothiorate
  modified_base 63: mod_base = OTHER; note = 2'-fluorouridine
  modified_base 73: mod_base = OTHER; note = Cytosine phosphorothiorate
  modified_base 74: mod_base = OTHER; note = 2'-Omethylcytosine
  modified_base 75: mod_base = OTHER; note = 2'-fluoroadenosine

SEQ ID NO: 9112 - RNA, 85 nt, synthetic construct; identical to SEQ ID NO: 3301
  source 1..85: mol_type = other RNA
  modified_base 1: mod_base = OTHER; note = 2'-Omethylguanosine phosphorothiorate
  modified_base 2: mod_base = OTHER; note = 2'-Omethylcytosine phosphorothiorate
  modified_base 4: mod_base = OTHER; note = Guanosine phosphorothiorate
  modified_base 12: mod_base = OTHER; note = 2'-fluorocytosine
  modified_base 16: mod_base = OTHER; note = 2'-Omethyluridine phosphorothiorate
  modified_base 22: mod_base = OTHER; note = 2'-Omethyladenosine phosphorothiorate
  modified_base 23: mod_base = OTHER; note = 2'-fluoroguanosine
  modified_base 25: mod_base = OTHER; note = Cytosine phosphorothiorate
  modified_base 37: mod_base = OTHER; note = 2'-fluoroadenosine
  modified_base 39: mod_base = OTHER; note = 2'-fluorouridine
  modified_base 43: mod_base = OTHER; note = 2'-fluoroadenosine
  modified_base 46: mod_base = OTHER; note = 2'-Omethylguanosine phosphorothiorate
  modified_base 51: mod_base = OTHER; note = 2'-fluorouridine
  modified_base 52: mod_base = OTHER; note = 2'-fluorocytosine
  modified_base 56: mod_base = OTHER; note = 2'-fluoroguanosine phosphorothiorate
  modified_base 59: mod_base = OTHER; note = 2'-Omethylcytosine
  modified_base 80: mod_base = OTHER; note = 2'-Omethylguanosine
  modified_base 82: mod_base = OTHER; note = 2'-fluoroguanosine

SEQ ID NO: 9113 - RNA, 76 nt, synthetic construct; identical to SEQ ID NO: 3318
  source 1..76: mol_type = other RNA
  modified_base 1: mod_base = OTHER; note = 2'-Omethylcytosine phosphorothiorate
  modified_base 2: mod_base = OTHER; note = 2'-Omethylcytosine phosphorothiorate
  modified_base 3: mod_base = OTHER; note = 2'-Omethyluridine
  modified_base 4: mod_base = OTHER; note = 2'-Omethyluridine
  modified_base 5: mod_base = OTHER; note = 2'-Omethylcytosine
  modified_base 6: mod_base = OTHER; note = 2'-Omethylguanosine
  modified_base 10: mod_base = OTHER; note = 2'-Omethylguanosine
  modified_base 11: mod_base = OTHER; note = 2'-Omethylcytosine
  modified_base 12: mod_base = OTHER; note = 2'-Omethyluridine
  modified_base 13: mod_base = OTHER; note = 2'-Omethylcytosine
  modified_base 18: mod_base = OTHER; note = Guanosine phosphorothiorate
  modified_base 19: mod_base = OTHER; note = 2'-Omethylguanosine
  modified_base 20: mod_base = OTHER; note = Uridine phosphorothiorate
  modified_base 22: mod_base = OTHER; note = 2'-Omethylguanosine
  modified_base 23: mod_base = OTHER; note = 2'-Omethyladenosine
  modified_base 24: mod_base = OTHER; note = 2'-Omethylguanosine
  modified_base 25: mod_base = OTHER; note = 2'-Omethylcytosine
  modified_base 29: mod_base = OTHER; note = 2'-Omethylguanosine
  modified_base 33: mod_base = OTHER; note = 2'-fluorouridine
  modified_base 35: mod_base = OTHER; note = Uridine phosphorothiorate
  modified_base 37: mod_base = OTHER; note = Guanosine phosphorothiorate
  modified_base 38: mod_base = OTHER; note = Adenosine phosphorothiorate
  modified_base 41: mod_base = OTHER; note = 2'-fluorocytosine phosphorothiorate
  modified_base 43: mod_base = OTHER; note = 2'-Omethyluridine
  modified_base 44: mod_base = OTHER; note = 2'-fluoroadenosine
  modified_base 46: mod_base = OTHER; note = Guanosine phosphorothiorate
  modified_base 49: mod_base = OTHER; note = 2'-Omethylguanosine
  modified_base 50: mod_base = OTHER; note = 2'-Omethylcytosine
  modified_base 51: mod_base = OTHER; note = 2'-Omethyluridine
  modified_base 52: mod_base = OTHER; note = 2'-Omethylguanosine
  modified_base 53: mod_base = OTHER; note = 2'-Omethylguanosine
  modified_base 54: mod_base = OTHER; note = Uridine phosphorothiorate
  modified_base 55: mod_base = OTHER; note = Uridine phosphorothiorate
  modified_base 56: mod_base = OTHER; note = 2'-Omethylcytosine
  modified_base 57: mod_base = OTHER; note = Guanosine phosphorothiorate
  modified_base 61: mod_base = OTHER; note = 2'-Omethylcytosine
  modified_base 62: mod_base = OTHER; note = 2'-Omethylcytosine
  modified_base 63: mod_base = OTHER; note = 2'-fluoroguanosine
  modified_base 64: mod_base = OTHER; note = 2'-Omethylguanosine
  modified_base 65: mod_base = OTHER; note = 2'-Omethylcytosine
  modified_base 66: mod_base = OTHER; note = 2'-Omethyluridine
  modified_base 67: mod_base = OTHER; note = 2'-Omethylcytosine
  modified_base 68: mod_base = OTHER; note = 2'-Omethylguanosine
  modified_base 71: mod_base = OTHER; note = 2'-Omethylguanosine
  modified_base 73: mod_base = OTHER; note = 2'-Omethyladenosine

SEQ ID NO: 9114 - RNA, 76 nt, synthetic construct; identical to SEQ ID NO: 625
  source 1..76: mol_type = other RNA
  modified_base 3: mod_base = OTHER; note = 2'-fluorocytosine
  modified_base 5: mod_base = OTHER; note = 2'-fluorocytosine
  modified_base 8: mod_base = OTHER; note = Uridine phosphorothiorate
  modified_base 10: mod_base = OTHER; note = 2'-Omethylguanosine
  modified_base 11: mod_base = OTHER; note = 2'-Omethylcytosine
  modified_base 14: mod_base = OTHER; note = Adenosine phosphorothiorate
  modified_base 15: mod_base = OTHER; note = 2'-fluoroadenosine phosphorothiorate
  modified_base 16: mod_base = OTHER; note = 2'-Omethyluridine phosphorothiorate
  modified_base 19: mod_base = OTHER; note = Adenosine phosphorothiorate
  modified_base 20: mod_base = OTHER; note = 2'-Omethyluridine phosphorothiorate
  modified_base 22: mod_base = OTHER; note = 2'-fluoroguanosine
  modified_base 25: mod_base = OTHER; note = Cytosine phosphorothiorate
  modified_base 26: mod_base = OTHER; note = 2'-fluoroadenosine phosphorothiorate
  modified_base 28: mod_base = OTHER; note = 2'-Omethyluridine
  modified_base 34: mod_base = OTHER; note = 2'-Omethyluridine
  modified_base 39: mod_base = OTHER; note = 2'-fluorouridine phosphorothiorate
  modified_base 40: mod_base = OTHER; note = 2'-fluorouridine
  modified_base 44: mod_base = OTHER; note = 2'-fluoroadenosine
  modified_base 45: mod_base = OTHER; note = 2'-fluoroguanosine
  modified_base 47: mod_base = OTHER; note = 2'-Omethyluridine phosphorothiorate
  modified_base 49: mod_base = OTHER; note = 2'-Omethylcytosine
  modified_base 51: mod_base = OTHER; note = Guanosine phosphorothiorate
  modified_base 53: mod_base = OTHER; note = 2'-Omethylguanosine
  modified_base 54: mod_base = OTHER; note = 2'-Omethyluridine
  modified_base 60: mod_base = OTHER; note = 2'-fluorouridine
  modified_base 62: mod_base = OTHER; note = 2'-fluorocytosine
  modified_base 65: mod_base = OTHER; note = 2'-fluoroguanosine
  modified_base 66: mod_base = OTHER; note = 2'-Omethylcytosine phosphorothiorate
  modified_base 68: mod_base = OTHER; note = 2'-Omethylguanosine
  modified_base 69: mod_base = OTHER; note = 2'-Omethyladenosine
  modified_base 70: mod_base = OTHER; note = Guanosine phosphorothiorate
  modified_base 75: mod_base = OTHER; note = 2'-Omethylcytosine

SEQ ID NO: 9115 - RNA, 76 nt, synthetic construct; identical to SEQ ID NO: 3289
  source 1..76: mol_type = other RNA
  modified_base 1: mod_base = OTHER; note = 2'-Omethylguanosine
  modified_base 2: mod_base = OTHER; note = 2'-Omethylcytosine
  modified_base 3: mod_base = OTHER; note = 2'-Omethylcytosine
  modified_base 4: mod_base = OTHER; note = 2'-Omethyluridine
  modified_base 5: mod_base = OTHER; note = 2'-Omethylguanosine
  modified_base 6: mod_base = OTHER; note = 2'-Omethylguanosine
  modified_base 73: mod_base = OTHER; note = 2'-Omethylguanosine

SEQ ID NO: 9116 - RNA, 75 nt, synthetic construct; identical to SEQ ID NO: 1045
  source 1..75: mol_type = other RNA
  modified_base 2: mod_base = OTHER; note = 2'-Omethylguanosine phosphorothiorate
  modified_base 8: mod_base = OTHER; note = 2'-Omethyluridine phosphorothiorate
  modified_base 15: mod_base = OTHER; note = 2'-Omethyladenosine
  modified_base 17: mod_base = OTHER; note = 2'-Omethylguanosine phosphorothiorate
  modified_base 28: mod_base = OTHER; note = 2'-fluorouridine phosphorothiorate
  modified_base 29: mod_base = OTHER; note = 2'-Omethylguanosine
  modified_base 38: mod_base = OTHER; note = Adenosine phosphorothiorate
  modified_base 42: mod_base = OTHER; note = 2'-Omethyladenosine
  modified_base 51: mod_base = OTHER; note = 2'-Omethyladenosine phosphorothiorate
  modified_base 52: mod_base = OTHER; note = 2'-Omethylguanosine phosphorothiorate
  modified_base 53: mod_base = OTHER; note = 2'-Omethyluridine
  modified_base 58: mod_base = OTHER; note = 2'-Omethylguanosine
  modified_base 60: mod_base = OTHER; note = Cytosine phosphorothiorate
  modified_base 66: mod_base = OTHER; note = 2'-Omethylguanosine
  modified_base 72: mod_base = OTHER; note = 2'-Omethyluridine
  modified_base 75: mod_base = OTHER; note = 2'-Omethyladenosine

SEQ ID NO: 9117 - RNA, 76 nt, synthetic construct; identical to SEQ ID NO: 3295
  source 1..76: mol_type = other RNA
  modified_base 1: mod_base = OTHER; note = 2'-fluorocytosine phosphorothiorate
  modified_base 3: mod_base = OTHER; note = 2'-Omethyluridine
  modified_base 6: mod_base = OTHER; note = 2'-Omethylguanosine phosphorothiorate
  modified_base 12: mod_base = OTHER; note = 2'-fluorouridine phosphorothiorate
  modified_base 13: mod_base = OTHER; note = 2'-Omethylcytosine
  modified_base 28: mod_base = OTHER; note = 2'-fluoroadenosine phosphorothiorate
  modified_base 29: mod_base = OTHER; note = 2'-fluoroguanosine
  modified_base 31: mod_base = OTHER; note = Adenosine phosphorothiorate
  modified_base 45: mod_base = OTHER; note = 2'-Omethylguanosine phosphorothiorate
  modified_base 49: mod_base = OTHER; note = 2'-fluoroguanosine phosphorothiorate
  modified_base 50: mod_base = OTHER; note = 2'-fluorocytosine phosphorothiorate
  modified_base 53: mod_base = OTHER; note = Guanosine phosphorothiorate
  modified_base 68: mod_base = OTHER; note = 2'-fluoroguanosine
  modified_base 75: mod_base = OTHER; note = 2'-Omethylcytosine phosphorothiorate

SEQ ID NO: 9118 - RNA, 85 nt, synthetic construct; identical to SEQ ID NO: 3297
  source 1..85: mol_type = other RNA
  modified_base 1: mod_base = OTHER; note = 2'-Omethylguanosine
  modified_base 14: mod_base = OTHER; note = 2'-Omethyladenosine phosphorothiorate
  modified_base 15: mod_base = OTHER; note = 2'-Omethylguanosine phosphorothiorate
  modified_base 16: mod_base = OTHER; note = 2'-Omethyluridine phosphorothiorate
  modified_base 17: mod_base = OTHER; note = 2'-Omethylguanosine phosphorothiorate
  modified_base 18: mod_base = OTHER; note = 2'-Omethylguanosine phosphorothiorate
  modified_base 19: mod_base = OTHER; note = Uridine phosphorothiorate
  modified_base 20: mod_base = OTHER; note = 2'-Omethyluridine phosphorothiorate
  modified_base 21: mod_base = OTHER; note = Adenosine phosphorothiorate
  modified_base 59: mod_base = OTHER; note = 2'-Omethylcytosine
  modified_base 61: mod_base = OTHER; note = 2'-Omethylguanosine
  modified_base 82: mod_base = OTHER; note = 2'-Omethylguanosine

SEQ ID NO: 9119 - RNA, 76 nt, synthetic construct; identical to SEQ ID NO: 625
  source 1..76: mol_type = other RNA
  modified_base 1: mod_base = OTHER; note = 2'-fluoroguanosine
  modified_base 3: mod_base = OTHER; note = Cytosine phosphorothiorate
  modified_base 4: mod_base = OTHER; note = 2'-Omethyluridine
  modified_base 6: mod_base = OTHER; note = 2'-Omethylcytosine
  modified_base 8: mod_base = OTHER; note = Uridine phosphorothiorate
  modified_base 9: mod_base = OTHER; note = Guanosine phosphorothiorate
  modified_base 10: mod_base = OTHER; note = 2'-fluoroguanosine
  modified_base 11: mod_base = OTHER; note = 2'-fluorocytosine
  modified_base 13: mod_base = OTHER; note = Cytosine phosphorothiorate
  modified_base 15: mod_base = OTHER; note = 2'-fluoroadenosine
  modified_base 16: mod_base = OTHER; note = Uridine phosphorothiorate
  modified_base 18: mod_base = OTHER; note = 2'-Omethylguanosine
  modified_base 19: mod_base = OTHER; note = Adenosine phosphorothiorate
  modified_base 22: mod_base = OTHER; note = 2'-fluoroguanosine
  modified_base 25: mod_base = OTHER; note = 2'-fluorocytosine phosphorothiorate
  modified_base 26: mod_base = OTHER; note = Adenosine phosphorothiorate
  modified_base 27: mod_base = OTHER; note = Uridine phosphorothiorate
  modified_base 28: mod_base = OTHER; note = 2'-fluorouridine
  modified_base 39: mod_base = OTHER; note = 2'-Omethyluridine
  modified_base 40: mod_base = OTHER; note = 2'-fluorouridine
  modified_base 46: mod_base = OTHER; note = 2'-fluoroguanosine
  modified_base 50: mod_base = OTHER; note = 2'-fluorocytosine
  modified_base 52: mod_base = OTHER; note = 2'-Omethylguanosine
  modified_base 53: mod_base = OTHER; note = Guanosine phosphorothiorate
  modified_base 54: mod_base = OTHER; note = Uridine phosphorothiorate
  modified_base 59: mod_base = OTHER; note = 2'-fluoroguanosine phosphorothiorate
  modified_base 60: mod_base = OTHER; note = 2'-Omethyluridine phosphorothiorate
  modified_base 61: mod_base = OTHER; note = 2'-fluorocytosine
  modified_base 62: mod_base = OTHER; note = 2'-fluorocytosine
  modified_base 66: mod_base = OTHER; note = 2'-Omethylcytosine
  modified_base 70: mod_base = OTHER; note = 2'-fluoroguanosine
  modified_base 71: mod_base = OTHER; note = Uridine phosphorothiorate
  modified_base 72: mod_base = OTHER; note = 2'-Omethylcytosine
  modified_base 73: mod_base = OTHER; note = 2'-fluoroguanosine
  modified_base 76: mod_base = OTHER; note = 2'-fluoroadenosine

SEQ ID NO: 9120 - RNA, 76 nt, synthetic construct; identical to SEQ ID NO: 625
  source 1..76: mol_type = other RNA
  modified_base 4: mod_base = OTHER; note = Thymine
  modified_base 8: mod_base = OTHER; note = Thymine
  modified_base 16: mod_base = OTHER; note = Thymine
  modified_base 20: mod_base = OTHER; note = Thymine
  modified_base 71: mod_base = OTHER; note = Thymine

SEQ ID NO: 9121 - RNA, 76 nt, synthetic construct; identical to SEQ ID NO: 625
  source 1..76: mol_type = other RNA
  modified_base 1: mod_base = OTHER; note = 2'-Omethylguanosine
  modified_base 2: mod_base = OTHER; note = 2'-Omethylguanosine
  modified_base 3: mod_base = OTHER; note = 2'-Omethylcytosine
  modified_base 4: mod_base = OTHER; note = 2'-Omethyluridine
  modified_base 5: mod_base = OTHER; note = 2'-Omethylcytosine
  modified_base 6: mod_base = OTHER; note = 2'-Omethylcytosine
  modified_base 7: mod_base = OTHER; note = Guanosine phosphorothiorate
  modified_base 9: mod_base = OTHER; note = 2'-Omethylguanosine phosphorothiorate
  modified_base 10: mod_base = OTHER; note = 2'-Omethylguanosine
  modified_base 11: mod_base = OTHER; note = 2'-Omethylcytosine
  modified_base 12: mod_base = OTHER; note = 2'-Omethylguanosine
  modified_base 13: mod_base = OTHER; note = 2'-Omethylcytosine
  modified_base 14: mod_base = OTHER; note = 2'-Omethyladenosine
  modified_base 15: mod_base = OTHER; note = 2'-fluoroadenosine phosphorothiorate
  modified_base 16: mod_base = OTHER; note = 2'-Omethyluridine
  modified_base 17: mod_base = OTHER; note = 2'-Omethylguanosine
  modified_base 18: mod_base = OTHER; note = 2'-Omethylguanosine
  modified_base 19: mod_base = OTHER; note = 2'-fluoroadenosine phosphorothiorate
  modified_base 20: mod_base = OTHER; note = Uridine phosphorothiorate
  modified_base 21: mod_base = OTHER; note = 2'-fluoroadenosine phosphorothiorate
  modified_base 22: mod_base = OTHER; note = 2'-Omethylguanosine
  modified_base 23: mod_base = OTHER; note = 2'-Omethylcytosine
  modified_base 24: mod_base = OTHER; note = 2'-Omethylguanosine
  modified_base 25: mod_base = OTHER; note = 2'-Omethylcytosine
  modified_base 26: mod_base = OTHER; note = Adenosine phosphorothiorate
  modified_base 28: mod_base = OTHER; note = 2'-Omethyluridine
  modified_base 29: mod_base = OTHER; note = 2'-fluoroguanosine phosphorothiorate
  modified_base 30: mod_base = OTHER; note = 2'-Omethylguanosine phosphorothiorate
  modified_base 31: mod_base = OTHER; note = 2'-Omethyladenosine phosphorothiorate
  modified_base 33: mod_base = OTHER; note = 2'-fluorouridine
  modified_base 34: mod_base = OTHER; note = 2'-Omethyluridine phosphorothiorate
  modified_base 35: mod_base = OTHER; note = 2'-Omethylcytosine phosphorothiorate
  modified_base 36: mod_base = OTHER; note = 2'-Omethyladenosine phosphorothiorate
  modified_base 37: mod_base = OTHER; note = 2'-Omethyladenosine phosphorothiorate
  modified_base 38: mod_base = OTHER; note = Adenosine phosphorothiorate
  modified_base 40: mod_base = OTHER; note = 2'-Omethyluridine
  modified_base 41: mod_base = OTHER; note = 2'-Omethylcytosine
  modified_base 42: mod_base = OTHER; note = Adenosine phosphorothiorate
  modified_base 44: mod_base = OTHER; note = 2'-Omethyladenosine phosphorothiorate
  modified_base 45: mod_base = OTHER; note = Guanosine phosphorothiorate
  modified_base 48: mod_base = OTHER; note = 2'-fluorouridine
  modified_base 49: mod_base = OTHER; note = 2'-Omethylcytosine
  modified_base 50: mod_base = OTHER; note = 2'-Omethylcytosine
  modified_base 51: mod_base = OTHER; note = 2'-Omethylguanosine
  modified_base 52: mod_base = OTHER; note = 2'-Omethylguanosine
  modified_base 53: mod_base = OTHER; note = 2'-Omethylguanosine phosphorothiorate
  modified_base 54: mod_base = OTHER; note = 2'-fluorouridine
  modified_base 55: mod_base = OTHER; note = Uridine phosphorothiorate
  modified_base 57: mod_base = OTHER; note = 2'-Omethylguanosine
  modified_base 59: mod_base = OTHER; note = 2'-Omethylguanosine
  modified_base 60: mod_base = OTHER; note = 2'-Omethyluridine phosphorothiorate
  modified_base 61: mod_base = OTHER; note = 2'-Omethylcytosine phosphorothiorate
  modified_base 62: mod_base = OTHER; note = 2'-Omethylcytosine
  modified_base 63: mod_base = OTHER; note = 2'-fluorocytosine
  modified_base 64: mod_base = OTHER; note = 2'-Omethylguanosine
  modified_base 65: mod_base = OTHER; note = 2'-Omethylguanosine phosphorothiorate
  modified_base 66: mod_base = OTHER; note = 2'-Omethylcytosine phosphorothiorate
  modified_base 67: mod_base = OTHER; note = 2'-Omethylguanosine phosphorothiorate
  modified_base 68: mod_base = OTHER; note = 2'-Omethylguanosine
  modified_base 69: mod_base = OTHER; note = 2'-fluoroadenosine phosphorothiorate
  modified_base 70: mod_base = OTHER; note = Guanosine phosphorothiorate
  modified_base 71: mod_base = OTHER; note = 2'-Omethyluridine phosphorothiorate
  modified_base 72: mod_base = OTHER; note = 2'-fluorocytosine phosphorothiorate
  modified_base 73: mod_base = OTHER; note = 2'-Omethylguanosine
  modified_base 74: mod_base = OTHER; note = 2'-fluorocytosine phosphorothiorate
  modified_base 75: mod_base = OTHER; note = 2'-fluorocytosine phosphorothiorate

SEQ ID NO: 9122 - RNA, 76 nt, synthetic construct; identical to SEQ ID NO: 3295
  source 1..76: mol_type = other RNA
  modified_base 1: mod_base = OTHER; note = 2'-Omethylcytosine phosphorothiorate
  modified_base 2: mod_base = OTHER; note = 2'-Omethylcytosine
  modified_base 3: mod_base = OTHER; note = 2'-fluorouridine
  modified_base 4: mod_base = OTHER; note = 2'-fluorouridine phosphorothiorate
  modified_base 5: mod_base = OTHER; note = 2'-Omethylcytosine
  modified_base 6: mod_base = OTHER; note = 2'-Omethylguanosine phosphorothiorate
  modified_base 12: mod_base = OTHER; note = 2'-Omethyluridine phosphorothiorate
  modified_base 13: mod_base = OTHER; note = 2'-fluorocytosine phosphorothiorate
  modified_base 17: mod_base = OTHER; note = 2'-Omethyluridine
  modified_base 20: mod_base = OTHER; note = 2'-fluorouridine
  modified_base 24: mod_base = OTHER; note = 2'-fluoroguanosine
  modified_base 25: mod_base = OTHER; note = 2'-fluorocytosine phosphorothiorate
  modified_base 27: mod_base = OTHER; note = 2'-fluoroguanosine phosphorothiorate
  modified_base 28: mod_base = OTHER; note = 2'-fluoroadenosine phosphorothiorate
  modified_base 36: mod_base = OTHER; note = 2'-fluoroadenosine
  modified_base 39: mod_base = OTHER; note = 2'-Omethyluridine phosphorothiorate
  modified_base 45: mod_base = OTHER; note = 2'-Omethylguanosine
  modified_base 46: mod_base = OTHER; note = 2'-fluoroguanosine phosphorothiorate
  modified_base 52: mod_base = OTHER; note = 2'-Omethylguanosine
  modified_base 53: mod_base = OTHER; note = Guanosine phosphorothiorate
  modified_base 69: mod_base = OTHER; note = 2'-fluoroadenosine
  modified_base 74: mod_base = OTHER; note = Cytosine phosphorothiorate
  modified_base 75: mod_base = OTHER; note = 2'-Omethylcytosine phosphorothiorate
  modified_base 76: mod_base = OTHER; note = 2'-fluoroadenosine

SEQ ID NO: 9123 - RNA, 85 nt, synthetic construct; identical to SEQ ID NO: 3297
  source 1..85: mol_type = other RNA
  modified_base 1: mod_base = OTHER; note = 2'-Omethylguanosine
  modified_base 2: mod_base = OTHER; note = 2'-Omethylcytosine
  modified_base 3: mod_base = OTHER; note = 2'-Omethyluridine
  modified_base 4: mod_base = OTHER; note = 2'-Omethylguanosine
  modified_base 5: mod_base = OTHER; note = 2'-Omethyluridine
  modified_base 6: mod_base = OTHER; note = 2'-Omethylguanosine
  modified_base 33: mod_base = OTHER; note = 2'-fluorouridine
  modified_base 41: mod_base = OTHER; note = 2'-Omethylcytosine
  modified_base 44: mod_base = OTHER; note = 2'-Omethyluridine
  modified_base 56: mod_base = OTHER; note = 2'-fluoroguanosine
  modified_base 57: mod_base = OTHER; note = 2'-fluorocytosine
  modified_base 61: mod_base = OTHER; note = 2'-Omethylguanosine
  modified_base 64: mod_base = OTHER; note = Uridine phosphorothiorate
  modified_base 80: mod_base = OTHER; note = 2'-Omethylguanosine
  modified_base 82: mod_base = OTHER; note = 2'-Omethylguanosine

SEQ ID NO: 9124 - RNA, 76 nt, synthetic construct; identical to SEQ ID NO: 625
  source 1..76: mol_type = other RNA
  modified_base 1: mod_base = OTHER; note = 2'-Omethylguanosine
  modified_base 10: mod_base = OTHER; note = 2'-Omethylguanosine
  modified_base 13: mod_base = OTHER; note = 2'-Omethylcytosine
  modified_base 17: mod_base = OTHER; note = Guanosine phosphorothiorate
  modified_base 18: mod_base = OTHER; note = 2'-Omethylguanosine
  modified_base 19: mod_base = OTHER; note = Adenosine phosphorothiorate
  modified_base 20: mod_base = OTHER; note = 2'-Omethyluridine
  modified_base 25: mod_base = OTHER; note = 2'-Omethylcytosine
  modified_base 29: mod_base = OTHER; note = 2'-Omethylguanosine
  modified_base 33: mod_base = OTHER; note = 2'-fluorouridine
  modified_base 35: mod_base = OTHER; note = Cytosine phosphorothiorate
  modified_base 37: mod_base = OTHER; note = Adenosine phosphorothiorate
  modified_base 38: mod_base = OTHER; note = Adenosine phosphorothiorate
  modified_base 41: mod_base = OTHER; note = 2'-fluorocytosine phosphorothiorate
  modified_base 43: mod_base = OTHER; note = 2'-Omethyladenosine
  modified_base 44: mod_base = OTHER; note = 2'-fluoroadenosine
  modified_base 50: mod_base = OTHER; note = 2'-Omethylcytosine
  modified_base 52: mod_base = OTHER; note = 2'-Omethylguanosine
  modified_base 54: mod_base = OTHER; note = Uridine phosphorothiorate
  modified_base 55: mod_base = OTHER; note = Uridine phosphorothiorate
  modified_base 56: mod_base = OTHER; note = 2'-Omethylcytosine
  modified_base 57: mod_base = OTHER; note = Guanosine phosphorothiorate
  modified_base 62: mod_base = OTHER; note = 2'-Omethylcytosine
  modified_base 63: mod_base = OTHER; note = 2'-fluorocytosine
  modified_base 65: mod_base = OTHER; note = 2'-Omethylguanosine
  modified_base 71: mod_base = OTHER; note = 2'-fluorouridine phosphorothiorate
  modified_base 73: mod_base = OTHER; note = 2'-Omethylguanosine

SEQ ID NO: 9125 - RNA, 76 nt, synthetic construct; identical to SEQ ID NO: 625
  source 1..76: mol_type = other RNA
  modified_base 1: mod_base = OTHER; note = 2'-Omethylguanosine
  modified_base 2: mod_base = OTHER; note = 2'-Omethylguanosine
  modified_base 3: mod_base = OTHER; note = 2'-Omethylcytosine
  modified_base 4: mod_base = OTHER; note = 2'-Omethyluridine
  modified_base 5: mod_base = OTHER; note = 2'-Omethylcytosine
  modified_base 9: mod_base = OTHER; note = Guanosine phosphorothiorate
  modified_base 10: mod_base = OTHER; note = 2'-Omethylguanosine
  modified_base 11: mod_base = OTHER; note = 2'-Omethylcytosine
  modified_base 12: mod_base = OTHER; note = 2'-Omethylguanosine
  modified_base 13: mod_base = OTHER; note = 2'-Omethylcytosine
  modified_base 14: mod_base = OTHER; note = 2'-Omethyladenosine
  modified_base 15: mod_base = OTHER; note = 2'-fluoroadenosine phosphorothiorate
  modified_base 16: mod_base = OTHER; note = 2'-fluorouridine phosphorothiorate
  modified_base 17: mod_base = OTHER; note = 2'-fluoroguanosine phosphorothiorate
  modified_base 18: mod_base = OTHER; note = 2'-fluoroguanosine phosphorothiorate
  modified_base 21: mod_base = OTHER; note = 2'-fluoroadenosine phosphorothiorate
  modified_base 22: mod_base = OTHER; note = 2'-Omethylguanosine
  modified_base 23: mod_base = OTHER; note = 2'-Omethylcytosine
  modified_base 24: mod_base = OTHER; note = 2'-Omethylguanosine
  modified_base 25: mod_base = OTHER; note = 2'-Omethylcytosine phosphorothiorate
  modified_base 26: mod_base = OTHER; note = Adenosine phosphorothiorate
  modified_base 28: mod_base = OTHER; note = 2'-Omethyluridine
  modified_base 29: mod_base = OTHER; note = 2'-fluoroguanosine phosphorothiorate
  modified_base 30: mod_base = OTHER; note = 2'-Omethylguanosine phosphorothiorate
  modified_base 31: mod_base = OTHER; note = 2'-Omethyladenosine phosphorothiorate
  modified_base 32: mod_base = OTHER; note = 2'-Omethylcytosine phosphorothiorate
  modified_base 33: mod_base = OTHER; note = 2'-fluorouridine
  modified_base 35: mod_base = OTHER; note = Cytosine phosphorothiorate
  modified_base 36: mod_base = OTHER; note = 2'-Omethyladenosine phosphorothiorate
  modified_base 37: mod_base = OTHER; note = Adenosine phosphorothiorate
  modified_base 38: mod_base = OTHER; note = 2'-Omethyladenosine phosphorothiorate
  modified_base 39: mod_base = OTHER; note = 2'-Omethyluridine phosphorothiorate
  modified_base 40: mod_base = OTHER; note = 2'-Omethyluridine
  modified_base 41: mod_base = OTHER; note = 2'-Omethylcytosine
  modified_base 42: mod_base = OTHER; note = Adenosine phosphorothiorate
  modified_base 43: mod_base = OTHER; note = Adenosine phosphorothiorate
  modified_base 44: mod_base = OTHER; note = 2'-Omethyladenosine
  modified_base 47: mod_base = OTHER; note = Uridine phosphorothiorate
  modified_base 48: mod_base = OTHER; note = 2'-fluorouridine
  modified_base 49: mod_base = OTHER; note = 2'-Omethylcytosine
  modified_base 50: mod_base = OTHER; note = 2'-Omethylcytosine
  modified_base 52: mod_base = OTHER; note = 2'-Omethylguanosine
  modified_base 53: mod_base = OTHER; note = 2'-Omethylguanosine
  modified_base 54: mod_base = OTHER; note = 2'-Omethyluridine
  modified_base 55: mod_base = OTHER; note = Uridine phosphorothiorate
  modified_base 56: mod_base = OTHER; note = Cytosine phosphorothiorate
  modified_base 57: mod_base = OTHER; note = 2'-Omethylguanosine
  modified_base 59: mod_base = OTHER; note = 2'-Omethylguanosine
  modified_base 60: mod_base = OTHER; note = 2'-Omethyluridine phosphorothiorate
  modified_base 61: mod_base = OTHER; note = 2'-Omethylcytosine
  modified_base 62: mod_base = OTHER; note = 2'-Omethylcytosine
  modified_base 63: mod_base = OTHER; note = 2'-fluorocytosine
  modified_base 64: mod_base = OTHER; note = 2'-Omethylguanosine
  modified_base 65: mod_base = OTHER; note = 2'-Omethylguanosine phosphorothiorate
  modified_base 66: mod_base = OTHER; note = 2'-Omethylcytosine
  modified_base 67: mod_base = OTHER; note = 2'-fluoroguanosine
  modified_base 68: mod_base = OTHER; note = 2'-Omethylguanosine phosphorothiorate
  modified_base 69: mod_base = OTHER; note = 2'-fluoroadenosine
  modified_base 70: mod_base = OTHER; note = 2'-fluoroguanosine phosphorothiorate
  modified_base 72: mod_base = OTHER; note = 2'-Omethylcytosine
  modified_base 73: mod_base = OTHER; note = 2'-Omethylguanosine
  modified_base 74: mod_base = OTHER; note = 2'-fluorocytosine phosphorothiorate
  modified_base 75: mod_base = OTHER; note = 2'-fluorocytosine phosphorothiorate
  modified_base 76: mod_base = OTHER; note = 2'-Omethyladenosine

SEQ ID NO: 9126 - RNA, 75 nt, synthetic construct; identical to SEQ ID NO: 1045
  source 1..75: mol_type = other RNA
  modified_base 2: mod_base = OTHER; note = 2'-Omethylguanosine phosphorothiorate
  modified_base 4: mod_base = OTHER; note = 2'-Omethyluridine
  modified_base 5: mod_base = OTHER; note = 2'-fluorocytosine phosphorothiorate
  modified_base 6: mod_base = OTHER; note = 2'-fluorocytosine phosphorothiorate
  modified_base 15: mod_base = OTHER; note = 2'-Omethyladenosine
  modified_base 16: mod_base = OTHER; note = 2'-Omethyluridine
  modified_base 17: mod_base = OTHER; note = 2'-Omethylguanosine phosphorothiorate
  modified_base 18: mod_base = OTHER; note = 2'-Omethylguanosine
  modified_base 26: mod_base = OTHER; note = Uridine phosphorothiorate
  modified_base 28: mod_base = OTHER; note = 2'-Omethyluridine
  modified_base 39: mod_base = OTHER; note = 2'-Omethyluridine phosphorothiorate
  modified_base 44: mod_base = OTHER; note = 2'-Omethylcytosine
  modified_base 52: mod_base = OTHER; note = 2'-fluoroguanosine phosphorothiorate
  modified_base 56: mod_base = OTHER; note = 2'-Omethylguanosine
  modified_base 67: mod_base = OTHER; note = 2'-Omethylguanosine
  modified_base 72: mod_base = OTHER; note = 2'-Omethyluridine
  modified_base 74: mod_base = OTHER; note = 2'-Omethylcytosine phosphorothiorate

SEQ ID NO: 9127 - RNA, 86 nt, synthetic construct; identical to SEQ ID NO: 3290
  source 1..86: mol_type = other RNA
  modified_base 86: mod_base = OTHER; note = 2'-Omethyladenosine

SEQ ID NO: 9128 - RNA, 76 nt, synthetic construct; identical to SEQ ID NO: 625
  source 1..76: mol_type = other RNA
  modified_base 1: mod_base = OTHER; note = 2'-Omethylguanosine phosphorothiorate
  modified_base 2: mod_base = OTHER; note = 2'-Omethylguanosine
  modified_base 25: mod_base = OTHER; note = 2'-fluorocytosine
  modified_base 73: mod_base = OTHER; note = Guanosine phosphorothiorate
  modified_base 74: mod_base = OTHER; note = Cytosine phosphorothiorate
  modified_base 75: mod_base = OTHER; note = 2'-Omethylcytosine

SEQ ID NO: 9129 - RNA, 75 nt, synthetic construct; identical to SEQ ID NO: 1045
  source 1..75: mol_type = other RNA
  modified_base 1: mod_base = OTHER; note = 2'-Omethylguanosine phosphorothiorate
  modified_base 2: mod_base = OTHER; note = 2'-fluoroguanosine phosphorothiorate
  modified_base 9: mod_base = OTHER; note = Guanosine phosphorothiorate
  modified_base 13: mod_base = OTHER; note = Uridine phosphorothiorate
  modified_base 20: mod_base = OTHER; note = 2'-fluoroadenosine
  modified_base 21: mod_base = OTHER; note = 2'-fluoroadenosine phosphorothiorate
  modified_base 31: mod_base = OTHER; note = 2'-fluoroadenosine phosphorothiorate
  modified_base 34: mod_base = OTHER; note = 2'-fluorouridine
  modified_base 38: mod_base = OTHER; note = Adenosine phosphorothiorate
  modified_base 41: mod_base = OTHER; note = 2'-fluorocytosine
  modified_base 42: mod_base = OTHER; note = 2'-Omethyladenosine
  modified_base 51: mod_base = OTHER; note = Adenosine phosphorothiorate
  modified_base 55: mod_base = OTHER; note = 2'-fluorocytosine
  modified_base 68: mod_base = OTHER; note = 2'-fluoroadenosine
  modified_base 69: mod_base = OTHER; note = Adenosine phosphorothiorate
  modified_base 73: mod_base = OTHER; note = 2'-fluorocytosine
  modified_base 75: mod_base = OTHER; note = 2'-fluoroadenosine

SEQ ID NO: 9130 - RNA, 85 nt, synthetic construct; identical to SEQ ID NO: 3288
  source 1..85: mol_type = other RNA
  modified_base 1: mod_base = OTHER; note = 2'-Omethylcytosine phosphorothiorate
  modified_base 2: mod_base = OTHER; note = 2'-Omethylcytosine phosphorothiorate
  modified_base 4: mod_base = OTHER; note = Guanosine phosphorothiorate
  modified_base 26: mod_base = OTHER; note = 2'-fluorouridine
  modified_base 33: mod_base = OTHER; note = 2'-fluorouridine
  modified_base 34: mod_base = OTHER; note = Cytosine phosphorothiorate
  modified_base 38: mod_base = OTHER; note = 2'-fluorouridine
  modified_base 51: mod_base = OTHER; note = 2'-Omethyluridine
  modified_base 54: mod_base = OTHER; note = 2'-Omethylcytosine
  modified_base 56: mod_base = OTHER; note = 2'-fluoroguanosine
  modified_base 57: mod_base = OTHER; note = 2'-Omethylcytosine
  modified_base 58: mod_base = OTHER; note = 2'-Omethylguanosine
  modified_base 69: mod_base = OTHER; note = Cytosine phosphorothiorate
  modified_base 72: mod_base = OTHER; note = 2'-fluorocytosine
  modified_base 84: mod_base = OTHER; note = 2'-fluorocytosine

SEQ ID NO: 9131 - RNA, 76 nt, synthetic construct; identical to SEQ ID NO: 625
  source 1..76: mol_type = other RNA
  modified_base 1: mod_base = OTHER; note = 2'-Omethylguanosine
  modified_base 2: mod_base = OTHER; note = 2'-Omethylguanosine
  modified_base 3: mod_base = OTHER; note = 2'-Omethylcytosine
  modified_base 4: mod_base = OTHER; note = 2'-Omethyluridine
  modified_base 5: mod_base = OTHER; note = 2'-Omethylcytosine
  modified_base 6: mod_base = OTHER; note = 2'-Omethylcytosine
  modified_base 10: mod_base = OTHER; note = 2'-Omethylguanosine
  modified_base 11: mod_base = OTHER; note = 2'-Omethylcytosine
  modified_base 12: mod_base = OTHER; note = 2'-Omethylguanosine
  modified_base 13: mod_base = OTHER; note = 2'-Omethylcytosine
  modified_base 22: mod_base = OTHER; note = 2'-Omethylguanosine
  modified_base 23: mod_base = OTHER; note = 2'-Omethylcytosine
  modified_base 24: mod_base = OTHER; note = 2'-Omethylguanosine
  modified_base 25: mod_base = OTHER; note = 2'-Omethylcytosine
  modified_base 49: mod_base = OTHER; note = 2'-Omethylcytosine
  modified_base 50: mod_base = OTHER; note = 2'-Omethylcytosine
  modified_base 51: mod_base = OTHER; note = 2'-Omethylguanosine
  modified_base 52: mod_base = OTHER; note = 2'-Omethylguanosine
  modified_base 53: mod_base = OTHER; note = 2'-Omethylguanosine
  modified_base 54: mod_base = OTHER; note = Uridine phosphorothiorate
  modified_base 55: mod_base = OTHER; note = Uridine phosphorothiorate
  modified_base 56: mod_base = OTHER; note = Cytosine phosphorothiorate
  modified_base 57: mod_base = OTHER; note = Guanosine phosphorothiorate

SEQ ID NO: 9132 - RNA, 85 nt, synthetic construct; identical to SEQ ID NO: 3301
  source 1..85: mol_type = other RNA
  modified_base 1: mod_base = OTHER; note = 2'-Omethylguanosine phosphorothiorate
  modified_base 2: mod_base = OTHER; note = 2'-Omethylcytosine phosphorothiorate
  modified_base 3: mod_base = OTHER; note = 2'-Omethyluridine phosphorothiorate
  modified_base 4: mod_base = OTHER; note = Guanosine phosphorothiorate
  modified_base 15: mod_base = OTHER; note = 2'-Omethylguanosine
  modified_base 17: mod_base = OTHER; note = 2'-Omethylguanosine
  modified_base 33: mod_base = OTHER; note = 2'-fluorouridine
  modified_base 44: mod_base = OTHER; note = 2'-Omethyluridine
  modified_base 45: mod_base = OTHER; note = 2'-fluoroguanosine
  modified_base 46: mod_base = OTHER; note = 2'-Omethylguanosine
  modified_base 55: mod_base = OTHER; note = 2'-Omethylcytosine phosphorothiorate
  modified_base 59: mod_base = OTHER; note = 2'-Omethylcytosine
  modified_base 61: mod_base = OTHER; note = 2'-Omethylguanosine
  modified_base 70: mod_base = OTHER; note = 2'-fluorocytosine
  modified_base 74: mod_base = OTHER; note = Cytosine phosphorothiorate
  modified_base 82: mod_base = OTHER; note = 2'-Omethylguanosine

SEQ ID NO: 9133 - RNA, 76 nt, synthetic construct; identical to SEQ ID NO: 3675
  source 1..76: mol_type = other RNA
  modified_base 1: mod_base = OTHER; note = 2'-Omethylguanosine phosphorothiorate
  modified_base 2: mod_base = OTHER; note = 2'-Omethylcytosine phosphorothiorate
  modified_base 3: mod_base = OTHER; note = 2'-Omethylcytosine
  modified_base 4: mod_base = OTHER; note = 2'-Omethyluridine
  modified_base 5: mod_base = OTHER; note = 2'-Omethylcytosine
  modified_base 6: mod_base = OTHER; note = 2'-Omethylcytosine
  modified_base 10: mod_base = OTHER; note = 2'-Omethylguanosine
  modified_base 11: mod_base = OTHER; note = 2'-Omethylcytosine
  modified_base 12: mod_base = OTHER; note = 2'-Omethylguanosine
  modified_base 13: mod_base = OTHER; note = 2'-Omethylcytosine
  modified_base 22: mod_base = OTHER; note = 2'-Omethylguanosine
  modified_base 23: mod_base = OTHER; note = 2'-Omethylcytosine
  modified_base 24: mod_base = OTHER; note = 2'-Omethylguanosine
  modified_base 25: mod_base = OTHER; note = 2'-Omethylcytosine
  modified_base 49: mod_base = OTHER; note = 2'-Omethylcytosine
  modified_base 50: mod_base = OTHER; note = 2'-Omethylcytosine
  modified_base 51: mod_base = OTHER; note = 2'-Omethylguanosine
  modified_base 52: mod_base = OTHER; note = 2'-Omethylguanosine
  modified_base 53: mod_base = OTHER; note = 2'-Omethylguanosine
  modified_base 54: mod_base = OTHER; note = 2'-Omethyluridine
  modified_base 61: mod_base = OTHER; note = 2'-Omethylcytosine
  modified_base 62: mod_base = OTHER; note = 2'-Omethylcytosine
  modified_base 63: mod_base = OTHER; note = 2'-fluorocytosine
  modified_base 64: mod_base = OTHER; note = 2'-Omethylguanosine
  modified_base 65: mod_base = OTHER; note = 2'-Omethylguanosine
  modified_base 66: mod_base = OTHER; note = 2'-Omethylcytosine
  modified_base 67: mod_base = OTHER; note = 2'-Omethylguanosine
  modified_base 68: mod_base = OTHER; note = 2'-Omethylguanosine
  modified_base 73: mod_base = OTHER; note = 2'-Omethylguanosine

SEQ ID NO: 9134 - RNA, 76 nt, synthetic construct; identical to SEQ ID NO: 3447
  source 1..76: mol_type = other RNA
  modified_base 1: mod_base = OTHER; note = 2'-Omethylguanosine
  modified_base 19: mod_base = OTHER; note = 2'-Omethyladenosine
  modified_base 20: mod_base = OTHER; note = 2'-Omethyluridine
  modified_base 21: mod_base = OTHER; note = 2'-fluoroadenosine
  modified_base 22: mod_base = OTHER; note = 2'-Omethylguanosine
  modified_base 40: mod_base = OTHER; note = 2'-fluorouridine
  modified_base 41: mod_base = OTHER; note = 2'-Omethylcytosine
  modified_base 42: mod_base = OTHER; note = 2'-Omethyladenosine
  modified_base 43: mod_base = OTHER; note = 2'-Omethyladenosine
  modified_base 73: mod_base = OTHER; note = 2'-Omethylguanosine

SEQ ID NO: 9135 - RNA, 76 nt, synthetic construct; identical to SEQ ID NO: 625
  source 1..76: mol_type = other RNA
  modified_base 1: mod_base = OTHER; note = 2'-Omethylguanosine
  modified_base 40: mod_base = OTHER; note = 2'-fluorouridine phosphorothiorate
  modified_base 41: mod_base = OTHER; note = 2'-O-(2-Methoxyethyl) 5-methylcytosine phosphorothiorate
  modified_base 42: mod_base = OTHER; note = 2'-Omethyladenosine
  modified_base 43: mod_base = OTHER; note = 2'-Omethyladenosine phosphorothiorate
  modified_base 73: mod_base = OTHER; note = 2'-Omethylguanosine

SEQ ID NO: 9136 - RNA, 74 nt, synthetic construct; identical to SEQ ID NO: 766
  source 1..74: mol_type = other RNA
  modified_base 1: mod_base = OTHER; note = 2'-Omethylguanosine phosphorothiorate
  modified_base 2: mod_base = OTHER; note = 2'-Omethylguanosine phosphorothiorate
  modified_base 3: mod_base = OTHER; note = 2'-Omethylcytosine
  modified_base 4: mod_base = OTHER; note = 2'-Omethyluridine
  modified_base 5: mod_base = OTHER; note = 2'-Omethylcytosine
  modified_base 6: mod_base = OTHER; note = 2'-Omethylcytosine
  modified_base 16: mod_base = OTHER; note = 2'-Omethyluridine
  modified_base 17: mod_base = OTHER; note = 2'-Omethylguanosine
  modified_base 18: mod_base = OTHER; note = 2'-Omethylguanosine
  modified_base 20: mod_base = OTHER; note = 2'-Omethyluridine
  modified_base 25: mod_base = OTHER; note = 2'-Omethylcytosine
  modified_base 33: mod_base = OTHER; note = 2'-fluorouridine
  modified_base 35: mod_base = OTHER; note = Cytosine phosphorothiorate
  modified_base 37: mod_base = OTHER; note = Adenosine phosphorothiorate
  modified_base 38: mod_base = OTHER; note = Adenosine phosphorothiorate
  modified_base 41: mod_base = OTHER; note = 2'-fluorocytosine
  modified_base 42: mod_base = OTHER; note = 2'-Omethyladenosine
  modified_base 43: mod_base = OTHER; note = 2'-Omethyladenosine
  modified_base 44: mod_base = OTHER; note = 2'-fluoroadenosine
  modified_base 49: mod_base = OTHER; note = 2'-Omethylcytosine
  modified_base 50: mod_base = OTHER; note = 2'-Omethylcytosine
  modified_base 52: mod_base = OTHER; note = 2'-Omethylguanosine
  modified_base 54: mod_base = OTHER; note = 2'-Omethyluridine
  modified_base 55: mod_base = OTHER; note = Uridine phosphorothiorate
  modified_base 56: mod_base = OTHER; note = 2'-Omethylcytosine
  modified_base 57: mod_base = OTHER; note = 2'-fluoroguanosine
  modified_base 59: mod_base = OTHER; note = 2'-Omethylguanosine
  modified_base 61: mod_base = OTHER; note = 2'-Omethylcytosine
  modified_base 62: mod_base = OTHER; note = 2'-Omethylcytosine
  modified_base 63: mod_base = OTHER; note = 2'-fluorocytosine
  modified_base 64: mod_base = OTHER; note = 2'-Omethylguanosine
  modified_base 65: mod_base = OTHER; note = 2'-Omethylguanosine
  modified_base 73: mod_base = OTHER; note = Guanosine phosphorothiorate

SEQ ID NO: 9137 - RNA, 76 nt, synthetic construct; identical to SEQ ID NO: 625
  source 1..76: mol_type = other RNA
  modified_base 1: mod_base = OTHER; note = 2'-Omethylguanosine phosphorothiorate
  modified_base 2: mod_base = OTHER; note = 2'-Omethylguanosine
  modified_base 17: mod_base = OTHER; note = 2'-Omethylguanosine
  modified_base 33: mod_base = OTHER; note = 2'-fluorouridine
  modified_base 35: mod_base = OTHER; note = Cytosine phosphorothiorate
  modified_base 37: mod_base = OTHER; note = Adenosine phosphorothiorate
  modified_base 38: mod_base = OTHER; note = Adenosine phosphorothiorate
  modified_base 52: mod_base = OTHER; note = 2'-fluoroguanosine
  modified_base 56: mod_base = OTHER; note = 2'-Omethylcytosine
  modified_base 59: mod_base = OTHER; note = 2'-Omethylguanosine
  modified_base 62: mod_base = OTHER; note = 2'-Omethylcytosine
  modified_base 73: mod_base = OTHER; note = 2'-Omethylguanosine
  modified_base 75: mod_base = OTHER; note = 2'-fluorocytosine phosphorothiorate

SEQ ID NO: 9138 - RNA, 76 nt, synthetic construct; identical to SEQ ID NO: 625
  source 1..76: mol_type = other RNA
  modified_base 1: mod_base = OTHER; note = 2'-Omethylguanosine phosphorothiorate
  modified_base 2: mod_base = OTHER; note = 2'-Omethylguanosine phosphorothiorate
  modified_base 3: mod_base = OTHER; note = 2'-Omethylcytosine
  modified_base 4: mod_base = OTHER; note = 2'-Omethyluridine
  modified_base 5: mod_base = OTHER; note = 2'-Omethylcytosine
  modified_base 6: mod_base = OTHER; note = 2'-Omethylcytosine
  modified_base 14: mod_base = OTHER; note = 2'-Omethyladenosine
  modified_base 15: mod_base = OTHER; note = 2'-Omethyladenosine
  modified_base 16: mod_base = OTHER; note = 2'-Omethyluridine
  modified_base 17: mod_base = OTHER; note = 2'-Omethylguanosine
  modified_base 18: mod_base = OTHER; note = 2'-Omethylguanosine
  modified_base 20: mod_base = OTHER; note = 2'-Omethyluridine
  modified_base 22: mod_base = OTHER; note = 2'-Omethylguanosine
  modified_base 23: mod_base = OTHER; note = 2'-Omethylcytosine
  modified_base 24: mod_base = OTHER; note = 2'-Omethylguanosine
  modified_base 25: mod_base = OTHER; note = 2'-Omethylcytosine
  modified_base 33: mod_base = OTHER; note = 2'-fluorouridine
  modified_base 35: mod_base = OTHER; note = Cytosine phosphorothiorate
  modified_base 37: mod_base = OTHER; note = Adenosine phosphorothiorate
  modified_base 38: mod_base = OTHER; note = Adenosine phosphorothiorate
  modified_base 41: mod_base = OTHER; note = 2'-Omethylcytosine
  modified_base 42: mod_base = OTHER; note = 2'-Omethyladenosine
  modified_base 43: mod_base = OTHER; note = 2'-Omethyladenosine
  modified_base 44: mod_base = OTHER; note = 2'-Omethyladenosine
  modified_base 49: mod_base = OTHER; note = 2'-Omethylcytosine
  modified_base 50: mod_base = OTHER; note = 2'-Omethylcytosine
  modified_base 52: mod_base = OTHER; note = 2'-Omethylguanosine
  modified_base 54: mod_base = OTHER; note = 2'-Omethyluridine
  modified_base 55: mod_base = OTHER; note = Uridine phosphorothiorate
  modified_base 56: mod_base = OTHER; note = 2'-Omethylcytosine
  modified_base 57: mod_base = OTHER; note = 2'-fluoroguanosine
  modified_base 59: mod_base = OTHER; note = 2'-Omethylguanosine
  modified_base 61: mod_base = OTHER; note = 2'-Omethylcytosine
  modified_base 62: mod_base = OTHER; note = 2'-Omethylcytosine
  modified_base 63: mod_base = OTHER; note = 2'-fluorocytosine
  modified_base 64: mod_base = OTHER; note = 2'-Omethylguanosine
  modified_base 65: mod_base = OTHER; note = 2'-Omethylguanosine
  modified_base 74: mod_base = OTHER; note = Cytosine phosphorothiorate
  modified_base 75: mod_base = OTHER; note = 2'-Omethylcytosine

SEQ ID NO: 9139 - RNA, 76 nt, synthetic construct; identical to SEQ ID NO: 625
  source 1..76: mol_type = other RNA
  modified_base 3: mod_base = OTHER; note = Cytosine phosphorothiorate
  modified_base 4: mod_base = OTHER; note = 2'-Omethyluridine
  modified_base 6: mod_base = OTHER; note = 2'-Omethylcytosine
  modified_base 10: mod_base = OTHER; note = Guanosine phosphorothiorate
  modified_base 11: mod_base = OTHER; note = 2'-Omethylcytosine
  modified_base 16: mod_base = OTHER; note = 2'-fluorouridine phosphorothiorate
  modified_base 20: mod_base = OTHER; note = 2'-Omethyluridine
  modified_base 22: mod_base = OTHER; note = 2'-Omethylguanosine
  modified_base 24: mod_base = OTHER; note = Guanosine phosphorothiorate
  modified_base 25: mod_base = OTHER; note = 2'-fluorocytosine phosphorothiorate
  modified_base 26: mod_base = OTHER; note = 2'-Omethyladenosine
  modified_base 28: mod_base = OTHER; note = 2'-Omethyluridine
  modified_base 29: mod_base = OTHER; note = Guanosine phosphorothiorate
  modified_base 33: mod_base = OTHER; note = 2'-fluorouridine
  modified_base 38: mod_base = OTHER; note = 2'-fluoroadenosine
  modified_base 39: mod_base = OTHER; note = Uridine phosphorothiorate
  modified_base 40: mod_base = OTHER; note = 2'-Omethyluridine phosphorothiorate
  modified_base 41: mod_base = OTHER; note = 2'-fluorocytosine
  modified_base 42: mod_base = OTHER; note = 2'-fluoroadenosine
  modified_base 43: mod_base = OTHER; note = 2'-Omethyladenosine
  modified_base 44: mod_base = OTHER; note = 2'-Omethyladenosine
  modified_base 46: mod_base = OTHER; note = 2'-Omethylguanosine
  modified_base 47: mod_base = OTHER; note = Uridine phosphorothiorate
  modified_base 51: mod_base = OTHER; note = 2'-Omethylguanosine
  modified_base 52: mod_base = OTHER; note = 2'-fluoroguanosine
  modified_base 54: mod_base = OTHER; note = 2'-Omethyluridine
  modified_base 55: mod_base = OTHER; note = Uridine phosphorothiorate
  modified_base 56: mod_base = OTHER; note = 2'-Omethylcytosine
  modified_base 57: mod_base = OTHER; note = 2'-Omethylguanosine
  modified_base 58: mod_base = OTHER; note = Adenosine phosphorothiorate
  modified_base 67: mod_base = OTHER; note = 2'-fluoroguanosine
  modified_base 68: mod_base = OTHER; note = 2'-fluoroguanosine
  modified_base 70: mod_base = OTHER; note = 2'-Omethylguanosine
  modified_base 71: mod_base = OTHER; note = Uridine phosphorothiorate
  modified_base 73: mod_base = OTHER; note = Guanosine phosphorothiorate
  modified_base 74: mod_base = OTHER; note = 2'-fluorocytosine

SEQ ID NO: 9140 - RNA, 76 nt, synthetic construct; identical to SEQ ID NO: 3318
  source 1..76: mol_type = other RNA
  modified_base 1: mod_base = OTHER; note = 2'-Omethylcytosine phosphorothiorate
  modified_base 2: mod_base = OTHER; note = 2'-Omethylcytosine phosphorothiorate
  modified_base 15: mod_base = OTHER; note = Guanosine phosphorothiorate
  modified_base 33: mod_base = OTHER; note = Uridine phosphorothiorate
  modified_base 34: mod_base = OTHER; note = 2'-fluorocytosine
  modified_base 74: mod_base = OTHER; note = 2'-fluorocytosine phosphorothiorate
  modified_base 75: mod_base = OTHER; note = 2'-Omethylcytosine phosphorothiorate
  modified_base 76: mod_base = OTHER; note = 2'-Omethyladenosine

SEQ ID NO: 9141 - RNA, 76 nt, synthetic construct; identical to SEQ ID NO: 3318
  source 1..76: mol_type = other RNA
  modified_base 1: mod_base = OTHER; note = 2'-Omethylcytosine
  modified_base 2: mod_base = OTHER; note = 2'-Omethylcytosine
  modified_base 3: mod_base = OTHER; note = 2'-Omethyluridine
  modified_base 4: mod_base = OTHER; note = 2'-Omethyluridine
  modified_base 5: mod_base = OTHER; note = 2'-Omethylcytosine
  modified_base 6: mod_base = OTHER; note = 2'-Omethylguanosine
  modified_base 49: mod_base = OTHER; note = 2'-Omethylguanosine
  modified_base 50: mod_base = OTHER; note = 2'-Omethylcytosine
  modified_base 51: mod_base = OTHER; note = 2'-Omethyluridine
  modified_base 52: mod_base = OTHER; note = 2'-Omethylguanosine
  modified_base 53: mod_base = OTHER; note = 2'-Omethylguanosine

SEQ ID NO: 9142 - RNA, 75 nt, synthetic construct; identical to SEQ ID NO: 3299
  source 1..75: mol_type = other RNA
  modified_base 2: mod_base = OTHER; note = 2'-Omethylcytosine
  modified_base 10: mod_base = OTHER; note = Cytosine phosphorothiorate
  modified_base 11: mod_base = OTHER; note = Uridine phosphorothiorate
  modified_base 18: mod_base = OTHER; note = 2'-fluoroguanosine
  modified_base 19: mod_base = OTHER; note = 2'-fluorouridine
  modified_base 20: mod_base = OTHER; note = 2'-fluoroadenosine
  modified_base 25: mod_base = OTHER; note = 2'-fluoroadenosine
  modified_base 28: mod_base = OTHER; note = 2'-Omethyladenosine phosphorothiorate
  modified_base 33: mod_base = OTHER; note = 2'-fluorouridine phosphorothiorate
  modified_base 38: mod_base = OTHER; note = 2'-fluorouridine
  modified_base 40: mod_base = OTHER; note = 2'-fluorouridine
  modified_base 41: mod_base = OTHER; note = 2'-Omethylguanosine phosphorothiorate
  modified_base 48: mod_base = OTHER; note = 2'-fluorocytosine phosphorothiorate
  modified_base 49: mod_base = OTHER; note = 2'-fluoroadenosine
  modified_base 52: mod_base = OTHER; note = 2'-Omethylguanosine
  modified_base 56: mod_base = OTHER; note = 2'-Omethyladenosine phosphorothiorate
  modified_base 62: mod_base = OTHER; note = 2'-Omethylcytosine phosphorothiorate
  modified_base 72: mod_base = OTHER; note = Guanosine phosphorothiorate
  modified_base 73: mod_base = OTHER; note = Cytosine phosphorothiorate
  modified_base 74: mod_base = OTHER; note = 2'-Omethylcytosine phosphorothiorate

SEQ ID NO: 9143 - RNA, 85 nt, synthetic construct; identical to SEQ ID NO: 3286
  source 1..85: mol_type = other RNA
  modified_base 1: mod_base = OTHER; note = 2'-Omethylcytosine
  modified_base 8: mod_base = OTHER; note = Guanosine phosphorothiorate
  modified_base 19: mod_base = OTHER; note = Uridine phosphorothiorate
  modified_base 26: mod_base = OTHER; note = 2'-fluorouridine
  modified_base 30: mod_base = OTHER; note = 2'-fluoroadenosine
  modified_base 32: mod_base = OTHER; note = 2'-fluorouridine
  modified_base 34: mod_base = OTHER; note = 2'-fluorouridine
  modified_base 46: mod_base = OTHER; note = 2'-fluoroadenosine
  modified_base 49: mod_base = OTHER; note = 2'-Omethyluridine
  modified_base 50: mod_base = OTHER; note = 2'-Omethyladenosine
  modified_base 56: mod_base = OTHER; note = 2'-Omethylguanosine
  modified_base 69: mod_base = OTHER; note = Cytosine phosphorothiorate
  modified_base 76: mod_base = OTHER; note = Cytosine phosphorothiorate
  modified_base 81: mod_base = OTHER; note = 2'-fluorouridine
  modified_base 85: mod_base = OTHER; note = 2'-fluoroadenosine

SEQ ID NO: 9144 - RNA, 85 nt, synthetic construct; identical to SEQ ID NO: 3317
  source 1..85: mol_type = other RNA
  modified_base 1: mod_base = OTHER; note = 2'-Omethylguanosine phosphorothiorate
  modified_base 2: mod_base = OTHER; note = 2'-Omethylcytosine
  modified_base 4: mod_base = OTHER; note = 2'-Omethylguanosine
  modified_base 33: mod_base = OTHER; note = 2'-fluorouridine
  modified_base 34: mod_base = OTHER; note = 2'-fluorocytosine
  modified_base 46: mod_base = OTHER; note = 2'-Omethylguanosine
  modified_base 55: mod_base = OTHER; note = 2'-fluorocytosine
  modified_base 57: mod_base = OTHER; note = Cytosine phosphorothiorate
  modified_base 60: mod_base = OTHER; note = 2'-Omethyladenosine phosphorothiorate
  modified_base 84: mod_base = OTHER; note = 2'-Omethylcytosine phosphorothiorate

SEQ ID NO: 9145 - RNA, 75 nt, synthetic construct; identical to SEQ ID NO: 3306
  source 1..75: mol_type = other RNA
  modified_base 1: mod_base = OTHER; note = 2'-Omethylguanosine
  modified_base 2: mod_base = OTHER; note = 2'-Omethyladenosine
  modified_base 3: mod_base = OTHER; note = 2'-Omethylcytosine
  modified_base 4: mod_base = OTHER; note = 2'-Omethylcytosine
  modified_base 5: mod_base = OTHER; note = 2'-Omethyluridine
  modified_base 6: mod_base = OTHER; note = 2'-Omethylcytosine

SEQ ID NO: 9146 - RNA, 76 nt, synthetic construct; identical to SEQ ID NO: 3342
  source 1..76: mol_type = other RNA
  modified_base 1: mod_base = OTHER; note = 2'-Omethylguanosine phosphorothiorate
  modified_base 2: mod_base = OTHER; note = 2'-Omethylguanosine phosphorothiorate
  modified_base 3: mod_base = OTHER; note = 2'-Omethylcytosine
  modified_base 4: mod_base = OTHER; note = 2'-Omethyluridine
  modified_base 5: mod_base = OTHER; note = 2'-Omethylcytosine
  modified_base 6: mod_base = OTHER; note = 2'-Omethylcytosine
  modified_base 10: mod_base = OTHER; note = 2'-Omethylguanosine
  modified_base 11: mod_base = OTHER; note = 2'-Omethylcytosine
  modified_base 12: mod_base = OTHER; note = 2'-Omethylguanosine
  modified_base 13: mod_base = OTHER; note = 2'-Omethylcytosine
  modified_base 14: mod_base = OTHER; note = 2'-Omethyladenosine
  modified_base 15: mod_base = OTHER; note = 2'-fluoroadenosine
  modified_base 16: mod_base = OTHER; note = 2'-Omethyluridine
  modified_base 17: mod_base = OTHER; note = 2'-Omethylguanosine
  modified_base 18: mod_base = OTHER; note = 2'-Omethylguanosine
  modified_base 19: mod_base = OTHER; note = 2'-fluoroadenosine
  modified_base 20: mod_base = OTHER; note = 2'-Omethyluridine
  modified_base 22: mod_base = OTHER; note = 2'-Omethylguanosine
  modified_base 23: mod_base = OTHER; note = 2'-Omethylcytosine
  modified_base 24: mod_base = OTHER; note = 2'-Omethylguanosine
  modified_base 25: mod_base = OTHER; note = 2'-Omethylcytosine
  modified_base 33: mod_base = OTHER; note = 2'-fluorouridine
  modified_base 35: mod_base = OTHER; note = Cytosine phosphorothiorate
  modified_base 37: mod_base = OTHER; note = Adenosine phosphorothiorate
  modified_base 38: mod_base = OTHER; note = Adenosine phosphorothiorate
  modified_base 44: mod_base = OTHER; note = 2'-Omethyladenosine
  modified_base 45: mod_base = OTHER; note = 2'-Omethylguanosine
  modified_base 46: mod_base = OTHER; note = 2'-fluoroguanosine
  modified_base 47: mod_base = OTHER; note = 2'-fluorouridine
  modified_base 48: mod_base = OTHER; note = 2'-fluorouridine
  modified_base 56: mod_base = OTHER; note = 2'-Omethylcytosine
  modified_base 59: mod_base = OTHER; note = 2'-Omethylguanosine
  modified_base 61: mod_base = OTHER; note = 2'-Omethylcytosine
  modified_base 62: mod_base = OTHER; note = 2'-Omethylcytosine
  modified_base 63: mod_base = OTHER; note = 2'-fluorocytosine
  modified_base 64: mod_base = OTHER; note = 2'-Omethylguanosine
  modified_base 65: mod_base = OTHER; note = 2'-Omethylguanosine
  modified_base 66: mod_base = OTHER; note = 2'-Omethylcytosine
  modified_base 67: mod_base = OTHER; note = 2'-Omethylguanosine
  modified_base 68: mod_base = OTHER; note = 2'-Omethylguanosine
  modified_base 73: mod_base = OTHER; note = 2'-Omethylguanosine

SEQ ID NO: 9147 - RNA, 75 nt, synthetic construct; identical to SEQ ID NO: 1045
  source 1..75: mol_type = other RNA
  modified_base 1: mod_base = OTHER; note = 2'-Omethylguanosine phosphorothiorate
  modified_base 2: mod_base = OTHER; note = 2'-Omethylguanosine phosphorothiorate
  modified_base 3: mod_base = OTHER; note = 2'-fluorouridine
  modified_base 8: mod_base = OTHER; note = 2'-fluorouridine phosphorothiorate
  modified_base 14: mod_base = OTHER; note = 2'-Omethyladenosine
  modified_base 15: mod_base = OTHER; note = 2'-fluoroadenosine phosphorothiorate
  modified_base 52: mod_base = OTHER; note = 2'-fluoroguanosine phosphorothiorate
  modified_base 60: mod_base = OTHER; note = 2'-Omethylcytosine
  modified_base 61: mod_base = OTHER; note = 2'-Omethyluridine
  modified_base 62: mod_base = OTHER; note = 2'-fluorocytosine phosphorothiorate
  modified_base 63: mod_base = OTHER; note = Guanosine phosphorothiorate
  modified_base 64: mod_base = OTHER; note = 2'-Omethylguanosine
  modified_base 71: mod_base = OTHER; note = 2'-fluorocytosine
  modified_base 72: mod_base = OTHER; note = 2'-Omethyluridine
  modified_base 73: mod_base = OTHER; note = Cytosine phosphorothiorate
  modified_base 74: mod_base = OTHER; note = 2'-Omethylcytosine phosphorothiorate
  modified_base 75: mod_base = OTHER; note = 2'-Omethyladenosine

SEQ ID NO: 9148 - RNA, 76 nt, synthetic construct; identical to SEQ ID NO: 625
  source 1..76: mol_type = other RNA
  modified_base 39: mod_base = OTHER; note = 2'-O-(2-Methoxyethyl) thymine
  modified_base 40: mod_base = OTHER; note = 2'-O-(2-Methoxyethyl) thymine
  modified_base 41: mod_base = OTHER; note = 2'-O-(2-Methoxyethyl) cytosine
  modified_base 42: mod_base = OTHER; note = 2'-O-(2-Methoxyethyl) adenosine
  modified_base 43: mod_base = OTHER; note = 2'-O-(2-Methoxyethyl) adenosine

SEQ ID NO: 9149 - RNA, 76 nt, synthetic construct; identical to SEQ ID NO: 625
  source 1..76: mol_type = other RNA
  modified_base 1: mod_base = OTHER; note = 2'-Omethylguanosine
  modified_base 2: mod_base = OTHER; note = Guanosine phosphorothiorate
  modified_base 3: mod_base = OTHER; note = 2'-Omethylcytosine
  modified_base 4: mod_base = OTHER; note = 2'-fluorouridine
  modified_base 5: mod_base = OTHER; note = 2'-Omethylcytosine
  modified_base 7: mod_base = OTHER; note = Guanosine phosphorothiorate
  modified_base 8: mod_base = OTHER; note = Uridine phosphorothiorate
  modified_base 11: mod_base = OTHER; note = 2'-fluorocytosine
  modified_base 12: mod_base = OTHER; note = Guanosine phosphorothiorate
  modified_base 20: mod_base = OTHER; note = Uridine phosphorothiorate
  modified_base 22: mod_base = OTHER; note = 2'-Omethylguanosine
  modified_base 25: mod_base = OTHER; note = 2'-fluorocytosine
  modified_base 26: mod_base = OTHER; note = 2'-fluoroadenosine
  modified_base 27: mod_base = OTHER; note = 2'-Omethyluridine
  modified_base 28: mod_base = OTHER; note = 2'-Omethyluridine phosphorothiorate
  modified_base 29: mod_base = OTHER; note = 2'-fluoroguanosine
  modified_base 30: mod_base = OTHER; note = 2'-Omethylguanosine
  modified_base 32: mod_base = OTHER; note = 2'-fluorocytosine
  modified_base 34: mod_base = OTHER; note = 2'-fluorouridine
  modified_base 38: mod_base = OTHER; note = 2'-fluoroadenosine
  modified_base 41: mod_base = OTHER; note = 2'-fluorocytosine
  modified_base 42: mod_base = OTHER; note = 2'-fluoroadenosine
  modified_base 48: mod_base = OTHER; note = 2'-Omethyluridine
  modified_base 50: mod_base = OTHER; note = 2'-fluorocytosine
  modified_base 52: mod_base = OTHER; note = 2'-Omethylguanosine phosphorothiorate
  modified_base 54: mod_base = OTHER; note = 2'-Omethyluridine
  modified_base 55: mod_base = OTHER; note = Uridine phosphorothiorate
  modified_base 56: mod_base = OTHER; note = 2'-fluorocytosine
  modified_base 58: mod_base = OTHER; note = Adenosine phosphorothiorate
  modified_base 59: mod_base = OTHER; note = 2'-Omethylguanosine
  modified_base 63: mod_base = OTHER; note = 2'-Omethylcytosine phosphorothiorate
  modified_base 69: mod_base = OTHER; note = 2'-Omethyladenosine
  modified_base 72: mod_base = OTHER; note = Cytosine phosphorothiorate
  modified_base 73: mod_base = OTHER; note = 2'-Omethylguanosine
  modified_base 74: mod_base = OTHER; note = 2'-fluorocytosine
  modified_base 75: mod_base = OTHER; note = 2'-Omethylcytosine

SEQ ID NO: 9150 - RNA, 76 nt, synthetic construct; identical to SEQ ID NO: 625
  source 1..76: mol_type = other RNA
  modified_base 1: mod_base = OTHER; note = 2'-Omethylguanosine phosphorothiorate
  modified_base 2: mod_base = OTHER; note = 2'-Omethylguanosine phosphorothiorate
  modified_base 3: mod_base = OTHER; note = 2'-Omethylcytosine
  modified_base 4: mod_base = OTHER; note = 2'-Omethyluridine
  modified_base 5: mod_base = OTHER; note = 2'-Omethylcytosine
  modified_base 6: mod_base = OTHER; note = 2'-Omethylcytosine
  modified_base 10: mod_base = OTHER; note = 2'-Omethylguanosine
  modified_base 11: mod_base = OTHER; note = 2'-Omethylcytosine
  modified_base 12: mod_base = OTHER; note = 2'-Omethylguanosine
  modified_base 13: mod_base = OTHER; note = 2'-Omethylcytosine
  modified_base 14: mod_base = OTHER; note = 2'-Omethyladenosine
  modified_base 15: mod_base = OTHER; note = 2'-Omethyladenosine
  modified_base 16: mod_base = OTHER; note = 2'-Omethyluridine
  modified_base 17: mod_base = OTHER; note = 2'-Omethylguanosine
  modified_base 18: mod_base = OTHER; note = 2'-Omethylguanosine
  modified_base 20: mod_base = OTHER; note = 2'-Omethyluridine
  modified_base 22: mod_base = OTHER; note = 2'-Omethylguanosine
  modified_base 23: mod_base = OTHER; note = 2'-Omethylcytosine
  modified_base 24: mod_base = OTHER; note = 2'-Omethylguanosine
  modified_base 25: mod_base = OTHER; note = 2'-Omethylcytosine
  modified_base 33: mod_base = OTHER; note = 2'-fluorouridine
  modified_base 35: mod_base = OTHER; note = Cytosine phosphorothiorate
  modified_base 37: mod_base = OTHER; note = Adenosine phosphorothiorate
  modified_base 38: mod_base = OTHER; note = Adenosine phosphorothiorate
  modified_base 41: mod_base = OTHER; note = 2'-fluorocytosine
  modified_base 42: mod_base = OTHER; note = 2'-Omethyladenosine
  modified_base 43: mod_base = OTHER; note = 2'-Omethyladenosine
  modified_base 44: mod_base = OTHER; note = 2'-fluoroadenosine
  modified_base 49: mod_base = OTHER; note = 2'-Omethylcytosine
  modified_base 50: mod_base = OTHER; note = 2'-Omethylcytosine
  modified_base 52: mod_base = OTHER; note = 2'-Omethylguanosine
  modified_base 54: mod_base = OTHER; note = 2'-Omethyluridine
  modified_base 55: mod_base = OTHER; note = Uridine phosphorothiorate
  modified_base 56: mod_base = OTHER; note = 2'-Omethylcytosine
  modified_base 57: mod_base = OTHER; note = 2'-fluoroguanosine
  modified_base 59: mod_base = OTHER; note = 2'-Omethylguanosine
  modified_base 61: mod_base = OTHER; note = 2'-Omethylcytosine
  modified_base 65: mod_base = OTHER; note = 2'-Omethylguanosine
  modified_base 74: mod_base = OTHER; note = Cytosine phosphorothiorate
  modified_base 75: mod_base = OTHER; note = 2'-Omethylcytosine phosphorothiorate

SEQ ID NO: 9151 - RNA, 76 nt, synthetic construct; identical to SEQ ID NO: 625
  source 1..76: mol_type = other RNA
  modified_base 1: mod_base = OTHER; note = 2'-Omethylguanosine phosphorothiorate
  modified_base 2: mod_base = OTHER; note = 2'-Omethylguanosine
  modified_base 3: mod_base = OTHER; note = 2'-Omethylcytosine
  modified_base 10: mod_base = OTHER; note = 2'-Omethylguanosine
  modified_base 11: mod_base = OTHER; note = 2'-Omethylcytosine
  modified_base 12: mod_base = OTHER; note = 2'-Omethylguanosine
  modified_base 13: mod_base = OTHER; note = 2'-Omethylcytosine
  modified_base 14: mod_base = OTHER; note = 2'-Omethyladenosine
  modified_base 15: mod_base = OTHER; note = 2'-fluoroadenosine
  modified_base 16: mod_base = OTHER; note = 2'-Omethyluridine
  modified_base 17: mod_base = OTHER; note = 2'-Omethylguanosine
  modified_base 18: mod_base = OTHER; note = 2'-Omethylguanosine
  modified_base 19: mod_base = OTHER; note = 2'-fluoroadenosine
  modified_base 20: mod_base = OTHER; note = 2'-Omethyluridine
  modified_base 21: mod_base = OTHER; note = 2'-fluoroadenosine
  modified_base 22: mod_base = OTHER; note = 2'-Omethylguanosine
  modified_base 23: mod_base = OTHER; note = 2'-Omethylcytosine
  modified_base 24: mod_base = OTHER; note = 2'-Omethylguanosine
  modified_base 25: mod_base = OTHER; note = 2'-Omethylcytosine
  modified_base 38: mod_base = OTHER; note = Adenosine phosphorothiorate
  modified_base 39: mod_base = OTHER; note = Uridine phosphorothiorate
  modified_base 40: mod_base = OTHER; note = 2'-fluorouridine
  modified_base 43: mod_base = OTHER; note = 2'-Omethyladenosine
  modified_base 44: mod_base = OTHER; note = 2'-Omethyladenosine
  modified_base 45: mod_base = OTHER; note = 2'-Omethylguanosine
  modified_base 46: mod_base = OTHER; note = 2'-fluoroguanosine
  modified_base 48: mod_base = OTHER; note = 2'-fluorouridine
  modified_base 49: mod_base = OTHER; note = 2'-Omethylcytosine
  modified_base 50: mod_base = OTHER; note = 2'-Omethylcytosine
  modified_base 54: mod_base = OTHER; note = Uridine phosphorothiorate
  modified_base 55: mod_base = OTHER; note = Uridine phosphorothiorate
  modified_base 56: mod_base = OTHER; note = 2'-Omethylcytosine
  modified_base 57: mod_base = OTHER; note = Guanosine phosphorothiorate
  modified_base 61: mod_base = OTHER; note = 2'-Omethylcytosine
  modified_base 62: mod_base = OTHER; note = 2'-Omethylcytosine
  modified_base 63: mod_base = OTHER; note = 2'-fluorocytosine
  modified_base 64: mod_base = OTHER; note = 2'-Omethylguanosine
  modified_base 65: mod_base = OTHER; note = 2'-Omethylguanosine
  modified_base 66: mod_base = OTHER; note = 2'-Omethylcytosine
  modified_base 67: mod_base = OTHER; note = 2'-Omethylguanosine
  modified_base 68: mod_base = OTHER; note = 2'-Omethylguanosine
  modified_base 69: mod_base = OTHER; note = 2'-Omethyladenosine
  modified_base 70: mod_base = OTHER; note = 2'-fluoroguanosine

SEQ ID NO: 9152 - RNA, 76 nt, synthetic construct; identical to SEQ ID NO: 625
  source 1..76: mol_type = other RNA
  modified_base 2: mod_base = OTHER; note = Guanosine phosphorothiorate
  modified_base 3: mod_base = OTHER; note = 2'-Omethylcytosine
  modified_base 4: mod_base = OTHER; note = 2'-fluorouridine
  modified_base 10: mod_base = OTHER; note = 2'-Omethylguanosine
  modified_base 12: mod_base = OTHER; note = Guanosine phosphorothiorate
  modified_base 13: mod_base = OTHER; note = Cytosine phosphorothiorate
  modified_base 14: mod_base = OTHER; note = 2'-Omethyladenosine
  modified_base 15: mod_base = OTHER; note = 2'-Omethyladenosine
  modified_base 17: mod_base = OTHER; note = Guanosine phosphorothiorate
  modified_base 18: mod_base = OTHER; note = 2'-Omethylguanosine
  modified_base 20: mod_base = OTHER; note = Uridine phosphorothiorate
  modified_base 26: mod_base = OTHER; note = 2'-Omethyladenosine phosphorothiorate
  modified_base 27: mod_base = OTHER; note = 2'-fluorouridine
  modified_base 28: mod_base = OTHER; note = 2'-fluorouridine
  modified_base 31: mod_base = OTHER; note = 2'-fluoroadenosine
  modified_base 32: mod_base = OTHER; note = 2'-fluorocytosine
  modified_base 38: mod_base = OTHER; note = 2'-fluoroadenosine
  modified_base 39: mod_base = OTHER; note = 2'-Omethyluridine
  modified_base 40: mod_base = OTHER; note = 2'-Omethyluridine
  modified_base 42: mod_base = OTHER; note = Adenosine phosphorothiorate
  modified_base 43: mod_base = OTHER; note = 2'-Omethyladenosine
  modified_base 45: mod_base = OTHER; note = Guanosine phosphorothiorate
  modified_base 48: mod_base = OTHER; note = 2'-Omethyluridine
  modified_base 49: mod_base = OTHER; note = 2'-Omethylcytosine
  modified_base 52: mod_base = OTHER; note = 2'-fluoroguanosine
  modified_base 53: mod_base = OTHER; note = Guanosine phosphorothiorate
  modified_base 54: mod_base = OTHER; note = 2'-fluorouridine phosphorothiorate
  modified_base 59: mod_base = OTHER; note = 2'-Omethylguanosine
  modified_base 60: mod_base = OTHER; note = 2'-fluorouridine
  modified_base 61: mod_base = OTHER; note = 2'-Omethylcytosine
  modified_base 62: mod_base = OTHER; note = 2'-fluorocytosine phosphorothiorate
  modified_base 63: mod_base = OTHER; note = 2'-Omethylcytosine
  modified_base 66: mod_base = OTHER; note = Cytosine phosphorothiorate
  modified_base 67: mod_base = OTHER; note = 2'-fluoroguanosine
  modified_base 68: mod_base = OTHER; note = Guanosine phosphorothiorate
  modified_base 69: mod_base = OTHER; note = 2'-fluoroadenosine
  modified_base 71: mod_base = OTHER; note = 2'-fluorouridine phosphorothiorate
  modified_base 72: mod_base = OTHER; note = Cytosine phosphorothiorate
  modified_base 75: mod_base = OTHER; note = 2'-fluorocytosine

SEQ ID NO: 9153 - RNA, 76 nt, synthetic construct; identical to SEQ ID NO: 625
  source 1..76: mol_type = other RNA
  modified_base 3: mod_base = OTHER; note = 2'-Omethylcytosine phosphorothiorate
  modified_base 7: mod_base = OTHER; note = Guanosine phosphorothiorate
  modified_base 12: mod_base = OTHER; note = Guanosine phosphorothiorate
  modified_base 13: mod_base = OTHER; note = 2'-fluorocytosine
  modified_base 14: mod_base = OTHER; note = 2'-Omethyladenosine
  modified_base 18: mod_base = OTHER; note = Guanosine phosphorothiorate
  modified_base 21: mod_base = OTHER; note = Adenosine phosphorothiorate
  modified_base 22: mod_base = OTHER; note = 2'-fluoroguanosine
  modified_base 25: mod_base = OTHER; note = 2'-Omethylcytosine
  modified_base 30: mod_base = OTHER; note = 2'-fluoroguanosine
  modified_base 33: mod_base = OTHER; note = 2'-fluorouridine phosphorothiorate
  modified_base 34: mod_base = OTHER; note = 2'-fluorouridine
  modified_base 37: mod_base = OTHER; note = Adenosine phosphorothiorate
  modified_base 39: mod_base = OTHER; note = 2'-Omethyluridine
  modified_base 40: mod_base = OTHER; note = 2'-Omethyluridine
  modified_base 43: mod_base = OTHER; note = Adenosine phosphorothiorate
  modified_base 46: mod_base = OTHER; note = 2'-Omethylguanosine
  modified_base 47: mod_base = OTHER; note = 2'-Omethyluridine
  modified_base 48: mod_base = OTHER; note = 2'-Omethyluridine
  modified_base 50: mod_base = OTHER; note = 2'-fluorocytosine phosphorothiorate
  modified_base 57: mod_base = OTHER; note = 2'-Omethylguanosine
  modified_base 59: mod_base = OTHER; note = 2'-Omethylguanosine
  modified_base 61: mod_base = OTHER; note = 2'-fluorocytosine
  modified_base 62: mod_base = OTHER; note = 2'-fluorocytosine
  modified_base 64: mod_base = OTHER; note = 2'-Omethylguanosine
  modified_base 66: mod_base = OTHER; note = 2'-Omethylcytosine phosphorothiorate
  modified_base 67: mod_base = OTHER; note = 2'-fluoroguanosine
  modified_base 68: mod_base = OTHER; note = Guanosine phosphorothiorate
  modified_base 69: mod_base = OTHER; note = 2'-Omethyladenosine
  modified_base 70: mod_base = OTHER; note = 2'-Omethylguanosine
  modified_base 72: mod_base = OTHER; note = 2'-Omethylcytosine
  modified_base 73: mod_base = OTHER; note = Guanosine phosphorothiorate
  modified_base 74: mod_base = OTHER; note = 2'-Omethylcytosine
  modified_base 75: mod_base = OTHER; note = Cytosine phosphorothiorate
  modified_base 76: mod_base = OTHER; note = 2'-fluoroadenosine

SEQ ID NO: 9154 - RNA, 86 nt, synthetic construct; identical to SEQ ID NO: 3290
  source 1..86: mol_type = other RNA
  modified_base 1: mod_base = OTHER; note = 2'-Omethyladenosine
  modified_base 13: mod_base = OTHER; note = 2'-Omethylguanosine
  modified_base 14: mod_base = OTHER; note = 2'-Omethyladenosine
  modified_base 15: mod_base = OTHER; note = 2'-Omethylguanosine
  modified_base 16: mod_base = OTHER; note = 2'-Omethyluridine
  modified_base 17: mod_base = OTHER; note = 2'-Omethylguanosine
  modified_base 18: mod_base = OTHER; note = 2'-Omethylguanosine
  modified_base 19: mod_base = OTHER; note = Uridine phosphorothiorate
  modified_base 20: mod_base = OTHER; note = 2'-Omethyluridine
  modified_base 21: mod_base = OTHER; note = Adenosine phosphorothiorate
  modified_base 25: mod_base = OTHER; note = 2'-Omethylcytosine
  modified_base 33: mod_base = OTHER; note = 2'-fluorouridine
  modified_base 34: mod_base = OTHER; note = 2'-Omethyluridine
  modified_base 35: mod_base = OTHER; note = Cytosine phosphorothiorate
  modified_base 37: mod_base = OTHER; note = Guanosine phosphorothiorate
  modified_base 38: mod_base = OTHER; note = Adenosine phosphorothiorate
  modified_base 59: mod_base = OTHER; note = 2'-Omethylguanosine
  modified_base 60: mod_base = OTHER; note = 2'-Omethyluridine
  modified_base 61: mod_base = OTHER; note = 2'-Omethylguanosine
  modified_base 62: mod_base = OTHER; note = 2'-Omethylguanosine
  modified_base 63: mod_base = OTHER; note = 2'-Omethylguanosine
  modified_base 64: mod_base = OTHER; note = Uridine phosphorothiorate
  modified_base 65: mod_base = OTHER; note = Uridine phosphorothiorate
  modified_base 71: mod_base = OTHER; note = 2'-Omethylcytosine
  modified_base 75: mod_base = OTHER; note = 2'-Omethylcytosine
  modified_base 83: mod_base = OTHER; note = 2'-Omethyladenosine

SEQ ID NO: 9155 - RNA, 76 nt, synthetic construct; identical to SEQ ID NO: 3289
  source 1..76: mol_type = other RNA
  modified_base 1: mod_base = OTHER; note = 2'-Omethylguanosine
  modified_base 13: mod_base = OTHER; note = 2'-Omethylcytosine
  modified_base 14: mod_base = OTHER; note = 2'-Omethyladenosine
  modified_base 15: mod_base = OTHER; note = 2'-Omethylguanosine
  modified_base 16: mod_base = OTHER; note = 2'-Omethyluridine
  modified_base 18: mod_base = OTHER; note = 2'-Omethylguanosine
  modified_base 19: mod_base = OTHER; note = 2'-Omethylguanosine
  modified_base 20: mod_base = OTHER; note = Uridine phosphorothiorate
  modified_base 21: mod_base = OTHER; note = Adenosine phosphorothiorate
  modified_base 22: mod_base = OTHER; note = 2'-Omethylguanosine
  modified_base 23: mod_base = OTHER; note = 2'-Omethyladenosine
  modified_base 24: mod_base = OTHER; note = 2'-Omethylguanosine
  modified_base 25: mod_base = OTHER; note = 2'-Omethylcytosine
  modified_base 33: mod_base = OTHER; note = 2'-fluorouridine
  modified_base 34: mod_base = OTHER; note = 2'-Omethyluridine
  modified_base 35: mod_base = OTHER; note = Uridine phosphorothiorate
  modified_base 37: mod_base = OTHER; note = Adenosine phosphorothiorate
  modified_base 38: mod_base = OTHER; note = Adenosine phosphorothiorate
  modified_base 49: mod_base = OTHER; note = 2'-Omethylcytosine
  modified_base 50: mod_base = OTHER; note = 2'-Omethyladenosine
  modified_base 52: mod_base = OTHER; note = 2'-Omethylguanosine
  modified_base 54: mod_base = OTHER; note = Uridine phosphorothiorate
  modified_base 55: mod_base = OTHER; note = Uridine phosphorothiorate
  modified_base 61: mod_base = OTHER; note = 2'-Omethylcytosine
  modified_base 65: mod_base = OTHER; note = 2'-Omethylguanosine
  modified_base 73: mod_base = OTHER; note = 2'-Omethylguanosine

SEQ ID NO: 9156 - RNA, 76 nt, synthetic construct; identical to SEQ ID NO: 625
  source 1..76: mol_type = other RNA
  modified_base 1: mod_base = OTHER; note = 2'-Omethylguanosine phosphorothiorate
  modified_base 2: mod_base = OTHER; note = 2'-Omethylguanosine phosphorothiorate
  modified_base 3: mod_base = OTHER; note = 2'-Omethylcytosine phosphorothiorate
  modified_base 4: mod_base = OTHER; note = 2'-Omethyluridine phosphorothiorate
  modified_base 5: mod_base = OTHER; note = 2'-Omethylcytosine phosphorothiorate
  modified_base 6: mod_base = OTHER; note = 2'-Omethylcytosine phosphorothiorate
  modified_base 10: mod_base = OTHER; note = 2'-Omethylguanosine
  modified_base 11: mod_base = OTHER; note = 2'-Omethylcytosine
  modified_base 12: mod_base = OTHER; note = 2'-Omethylguanosine
  modified_base 13: mod_base = OTHER; note = 2'-Omethylcytosine
  modified_base 14: mod_base = OTHER; note = 2'-Omethyladenosine
  modified_base 15: mod_base = OTHER; note = 2'-Omethyladenosine
  modified_base 16: mod_base = OTHER; note = 2'-Omethyluridine
  modified_base 17: mod_base = OTHER; note = 2'-Omethylguanosine
  modified_base 18: mod_base = OTHER; note = 2'-Omethylguanosine
  modified_base 19: mod_base = OTHER; note = 2'-Omethyladenosine
  modified_base 20: mod_base = OTHER; note = 2'-Omethyluridine
  modified_base 22: mod_base = OTHER; note = 2'-Omethylguanosine
  modified_base 23: mod_base = OTHER; note = 2'-Omethylcytosine
  modified_base 24: mod_base = OTHER; note = 2'-Omethylguanosine
  modified_base 25: mod_base = OTHER; note = 2'-Omethylcytosine
  modified_base 49: mod_base = OTHER; note = 2'-Omethylcytosine
  modified_base 50: mod_base = OTHER; note = 2'-Omethylcytosine
  modified_base 51: mod_base = OTHER; note = 2'-Omethylguanosine
  modified_base 52: mod_base = OTHER; note = 2'-Omethylguanosine
  modified_base 53: mod_base = OTHER; note = 2'-Omethylguanosine
  modified_base 61: mod_base = OTHER; note = 2'-Omethylcytosine
  modified_base 62: mod_base = OTHER; note = 2'-Omethylcytosine
  modified_base 63: mod_base = OTHER; note = 2'-Omethylcytosine
  modified_base 64: mod_base = OTHER; note = 2'-Omethylguanosine
  modified_base 65: mod_base = OTHER; note = 2'-Omethylguanosine
  modified_base 66: mod_base = OTHER; note = 2'-Omethylcytosine
  modified_base 67: mod_base = OTHER; note = 2'-Omethylguanosine
  modified_base 68: mod_base = OTHER; note = 2'-Omethylguanosine
  modified_base 69: mod_base = OTHER; note = 2'-Omethyladenosine

SEQ ID NO: 9157 - RNA, 76 nt, synthetic construct; identical to SEQ ID NO: 625
  source 1..76: mol_type = other RNA
  modified_base 1: mod_base = OTHER; note = 2'-Omethylguanosine
  modified_base 10: mod_base = OTHER; note = 2'-Omethylguanosine
  modified_base 13: mod_base = OTHER; note = 2'-Omethylcytosine
  modified_base 17: mod_base = OTHER; note = Guanosine phosphorothiorate
  modified_base 18: mod_base = OTHER; note = 2'-Omethylguanosine
  modified_base 19: mod_base = OTHER; note = Adenosine phosphorothiorate
  modified_base 20: mod_base = OTHER; note = 2'-Omethyluridine
  modified_base 25: mod_base = OTHER; note = 2'-Omethylcytosine
  modified_base 29: mod_base = OTHER; note = 2'-Omethylguanosine
  modified_base 33: mod_base = OTHER; note = 2'-fluorouridine
  modified_base 35: mod_base = OTHER; note = Cytosine phosphorothiorate
  modified_base 37: mod_base = OTHER; note = Adenosine phosphorothiorate
  modified_base 38: mod_base = OTHER; note = Adenosine phosphorothiorate
  modified_base 41: mod_base = OTHER; note = 2'-fluorocytosine phosphorothiorate
  modified_base 43: mod_base = OTHER; note = 2'-Omethyladenosine
  modified_base 44: mod_base = OTHER; note = 2'-fluoroadenosine
  modified_base 46: mod_base = OTHER; note = Guanosine phosphorothiorate
  modified_base 50: mod_base = OTHER; note = 2'-Omethylcytosine
  modified_base 52: mod_base = OTHER; note = 2'-Omethylguanosine
  modified_base 55: mod_base = OTHER; note = Uridine phosphorothiorate
  modified_base 56: mod_base = OTHER; note = Cytosine phosphorothiorate
  modified_base 62: mod_base = OTHER; note = 2'-Omethylcytosine
  modified_base 63: mod_base = OTHER; note = 2'-fluorocytosine
  modified_base 65: mod_base = OTHER; note = 2'-Omethylguanosine
  modified_base 71: mod_base = OTHER; note = 2'-Omethyluridine
  modified_base 73: mod_base = OTHER; note = 2'-Omethylguanosine

SEQ ID NO: 9158 - RNA, 76 nt, synthetic construct; identical to SEQ ID NO: 625
  source 1..76: mol_type = other RNA
  modified_base 1: mod_base = OTHER; note = Guanosine phosphorothiorate
  modified_base 2: mod_base = OTHER; note = Guanosine phosphorothiorate
  modified_base 3: mod_base = OTHER; note = Cytosine phosphorothiorate
  modified_base 4: mod_base = OTHER; note = Uridine phosphorothiorate
  modified_base 5: mod_base = OTHER; note = Cytosine phosphorothiorate
  modified_base 6: mod_base = OTHER; note = Cytosine phosphorothiorate
  modified_base 7: mod_base = OTHER; note = Guanosine phosphorothiorate
  modified_base 66: mod_base = OTHER; note = Cytosine phosphorothiorate
  modified_base 67: mod_base = OTHER; note = Guanosine phosphorothiorate
  modified_base 68: mod_base = OTHER; note = Guanosine phosphorothiorate
  modified_base 69: mod_base = OTHER; note = Adenosine phosphorothiorate
  modified_base 70: mod_base = OTHER; note = Guanosine phosphorothiorate
  modified_base 71: mod_base = OTHER; note = Uridine phosphorothiorate
  modified_base 72: mod_base = OTHER; note = Cytosine phosphorothiorate

SEQ ID NO: 9159 - RNA, 76 nt, synthetic construct; identical to SEQ ID NO: 625
  source 1..76: mol_type = other RNA
  modified_base 1: mod_base = OTHER; note = 2'-Omethylguanosine phosphorothiorate
  modified_base 2: mod_base = OTHER; note = 2'-Omethylguanosine
  modified_base 13: mod_base = OTHER; note = 2'-Omethylcytosine
  modified_base 33: mod_base = OTHER; note = 2'-fluorouridine
  modified_base 35: mod_base = OTHER; note = Cytosine phosphorothiorate
  modified_base 37: mod_base = OTHER; note = Adenosine phosphorothiorate
  modified_base 38: mod_base = OTHER; note = Adenosine phosphorothiorate
  modified_base 52: mod_base = OTHER; note = 2'-Omethylguanosine
  modified_base 56: mod_base = OTHER; note = 2'-Omethylcytosine
  modified_base 65: mod_base = OTHER; note = 2'-Omethylguanosine
  modified_base 73: mod_base = OTHER; note = 2'-Omethylguanosine
  modified_base 75: mod_base = OTHER; note = 2'-fluorocytosine phosphorothiorate

SEQ ID NO: 9160 - RNA, 75 nt, synthetic construct; identical to SEQ ID NO: 1045
  source 1..75: mol_type = other RNA
  modified_base 1: mod_base = OTHER; note = 2'-Omethylguanosine
  modified_base 10: mod_base = OTHER; note = 2'-Omethylguanosine
  modified_base 11: mod_base = OTHER; note = 2'-Omethyluridine
  modified_base 12: mod_base = OTHER; note = 2'-Omethylguanosine
  modified_base 13: mod_base = OTHER; note = 2'-Omethyluridine
  modified_base 14: mod_base = OTHER; note = 2'-Omethyladenosine
  modified_base 15: mod_base = OTHER; note = 2'-Omethyladenosine
  modified_base 16: mod_base = OTHER; note = 2'-Omethyluridine
  modified_base 17: mod_base = OTHER; note = 2'-Omethylguanosine
  modified_base 18: mod_base = OTHER; note = 2'-Omethylguanosine
  modified_base 19: mod_base = OTHER; note = Uridine phosphorothiorate
  modified_base 20: mod_base = OTHER; note = 2'-Omethyladenosine
  modified_base 21: mod_base = OTHER; note = Adenosine phosphorothiorate
  modified_base 25: mod_base = OTHER; note = 2'-Omethylcytosine
  modified_base 33: mod_base = OTHER; note = Uridine phosphorothiorate
  modified_base 34: mod_base = OTHER; note = 2'-Omethyluridine
  modified_base 35: mod_base = OTHER; note = Uridine phosphorothiorate
  modified_base 37: mod_base = OTHER; note = Adenosine phosphorothiorate
  modified_base 38: mod_base = OTHER; note = Adenosine phosphorothiorate
  modified_base 48: mod_base = OTHER; note = 2'-Omethylcytosine
  modified_base 49: mod_base = OTHER; note = 2'-Omethylcytosine
  modified_base 51: mod_base = OTHER; note = 2'-Omethyladenosine
  modified_base 53: mod_base = OTHER; note = Uridine phosphorothiorate
  modified_base 54: mod_base = OTHER; note = Uridine phosphorothiorate
  modified_base 60: mod_base = OTHER; note = 2'-Omethylcytosine
  modified_base 64: mod_base = OTHER; note = 2'-Omethylguanosine
  modified_base 72: mod_base = OTHER; note = 2'-Omethyluridine

SEQ ID NO: 9161 - RNA, 75 nt, synthetic construct; identical to SEQ ID NO: 3306
  source 1..75: mol_type = other RNA
  modified_base 1: mod_base = OTHER; note = 2'-Omethylguanosine phosphorothiorate
  modified_base 2: mod_base = OTHER; note = 2'-Omethyladenosine phosphorothiorate
  modified_base 3: mod_base = OTHER; note = 2'-Omethylcytosine
  modified_base 4: mod_base = OTHER; note = 2'-Omethylcytosine
  modified_base 5: mod_base = OTHER; note = 2'-Omethyluridine
  modified_base 6: mod_base = OTHER; note = 2'-Omethylcytosine
  modified_base 10: mod_base = OTHER; note = 2'-Omethylguanosine
  modified_base 11: mod_base = OTHER; note = 2'-Omethylcytosine
  modified_base 12: mod_base = OTHER; note = 2'-Omethylguanosine
  modified_base 13: mod_base = OTHER; note = 2'-Omethylcytosine
  modified_base 17: mod_base = OTHER; note = 2'-Omethylguanosine
  modified_base 18: mod_base = OTHER; note = 2'-Omethylguanosine
  modified_base 21: mod_base = OTHER; note = 2'-Omethylguanosine
  modified_base 22: mod_base = OTHER; note = 2'-Omethylcytosine
  modified_base 23: mod_base = OTHER; note = 2'-Omethylguanosine
  modified_base 24: mod_base = OTHER; note = 2'-Omethylcytosine
  modified_base 32: mod_base = OTHER; note = 2'-fluorouridine
  modified_base 33: mod_base = OTHER; note = 2'-Omethylcytosine
  modified_base 34: mod_base = OTHER; note = Uridine phosphorothiorate
  modified_base 36: mod_base = OTHER; note = Guanosine phosphorothiorate
  modified_base 37: mod_base = OTHER; note = Adenosine phosphorothiorate
  modified_base 40: mod_base = OTHER; note = 2'-fluoroadenosine
  modified_base 41: mod_base = OTHER; note = 2'-Omethylguanosine
  modified_base 42: mod_base = OTHER; note = 2'-Omethyladenosine
  modified_base 43: mod_base = OTHER; note = 2'-fluoroadenosine
  modified_base 48: mod_base = OTHER; note = 2'-Omethylguanosine
  modified_base 49: mod_base = OTHER; note = 2'-Omethylcytosine
  modified_base 50: mod_base = OTHER; note = 2'-Omethylguanosine
  modified_base 51: mod_base = OTHER; note = 2'-Omethyluridine
  modified_base 52: mod_base = OTHER; note = 2'-Omethylguanosine
  modified_base 53: mod_base = OTHER; note = Uridine phosphorothiorate
  modified_base 54: mod_base = OTHER; note = Uridine phosphorothiorate
  modified_base 60: mod_base = OTHER; note = 2'-Omethylcytosine
  modified_base 61: mod_base = OTHER; note = 2'-Omethyladenosine
  modified_base 62: mod_base = OTHER; note = 2'-fluorocytosine
  modified_base 63: mod_base = OTHER; note = 2'-Omethylguanosine
  modified_base 64: mod_base = OTHER; note = 2'-Omethyluridine
  modified_base 65: mod_base = OTHER; note = 2'-Omethylcytosine
  modified_base 66: mod_base = OTHER; note = 2'-Omethylguanosine
  modified_base 67: mod_base = OTHER; note = 2'-Omethylguanosine
  modified_base 72: mod_base = OTHER; note = 2'-Omethyladenosine

SEQ ID NO: 9162 - RNA, 76 nt, synthetic construct; identical to SEQ ID NO: 3289
  source 1..76: mol_type = other RNA
  modified_base 50: mod_base = OTHER; note = 2'-Omethyladenosine
  modified_base 73: mod_base = OTHER; note = 2'-Omethylguanosine

SEQ ID NO: 9163 - RNA, 75 nt, synthetic construct; identical to SEQ ID NO: 3299
  source 1..75: mol_type = other RNA
  modified_base 15: mod_base = OTHER; note = 2'-fluorouridine
  modified_base 26: mod_base = OTHER; note = Uridine phosphorothiorate
  modified_base 29: mod_base = OTHER; note = 2'-fluoroguanosine
  modified_base 38: mod_base = OTHER; note = Uridine phosphorothiorate
  modified_base 42: mod_base = OTHER; note = 2'-fluoroadenosine
  modified_base 47: mod_base = OTHER; note = 2'-fluorocytosine
  modified_base 72: mod_base = OTHER; note = Guanosine phosphorothiorate
  modified_base 74: mod_base = OTHER; note = Cytosine phosphorothiorate

SEQ ID NO: 9164 - RNA, 76 nt, synthetic construct; identical to SEQ ID NO: 625
  source 1..76: mol_type = other RNA
  modified_base 1: mod_base = OTHER; note = 2'-Omethylguanosine phosphorothiorate
  modified_base 2: mod_base = OTHER; note = 2'-Omethylguanosine phosphorothiorate
  modified_base 3: mod_base = OTHER; note = 2'-Omethylcytosine
  modified_base 4: mod_base = OTHER; note = 2'-Omethyluridine
  modified_base 5: mod_base = OTHER; note = 2'-Omethylcytosine
  modified_base 6: mod_base = OTHER; note = 2'-Omethylcytosine
  modified_base 16: mod_base = OTHER; note = 2'-Omethyluridine
  modified_base 17: mod_base = OTHER; note = 2'-Omethylguanosine
  modified_base 18: mod_base = OTHER; note = 2'-Omethylguanosine
  modified_base 20: mod_base = OTHER; note = 2'-Omethyluridine
  modified_base 25: mod_base = OTHER; note = 2'-Omethylcytosine
  modified_base 33: mod_base = OTHER; note = 2'-fluorouridine
  modified_base 35: mod_base = OTHER; note = Cytosine phosphorothiorate
  modified_base 37: mod_base = OTHER; note = Adenosine phosphorothiorate
  modified_base 38: mod_base = OTHER; note = Adenosine phosphorothiorate
  modified_base 41: mod_base = OTHER; note = 2'-Omethylcytosine
  modified_base 42: mod_base = OTHER; note = 2'-Omethyladenosine
  modified_base 43: mod_base = OTHER; note = 2'-Omethyladenosine
  modified_base 44: mod_base = OTHER; note = 2'-Omethyladenosine
  modified_base 49: mod_base = OTHER; note = 2'-Omethylcytosine
  modified_base 50: mod_base = OTHER; note = 2'-Omethylcytosine
  modified_base 52: mod_base = OTHER; note = 2'-Omethylguanosine
  modified_base 54: mod_base = OTHER; note = Uridine phosphorothiorate
  modified_base 55: mod_base = OTHER; note = Uridine phosphorothiorate
  modified_base 61: mod_base = OTHER; note = 2'-Omethylcytosine
  modified_base 65: mod_base = OTHER; note = 2'-Omethylguanosine
  modified_base 74: mod_base = OTHER; note = Cytosine phosphorothiorate
  modified_base 75: mod_base = OTHER; note = 2'-Omethylcytosine

SEQ ID NO: 9165 - RNA, 76 nt, synthetic construct; identical to SEQ ID NO: 625
  source 1..76: mol_type = other RNA
  modified_base 2: mod_base = OTHER; note = 2'-Omethylguanosine phosphorothiorate
  modified_base 3: mod_base = OTHER; note = 2'-Omethylcytosine
  modified_base 4: mod_base = OTHER; note = Uridine phosphorothiorate
  modified_base 7: mod_base = OTHER; note = Guanosine phosphorothiorate
  modified_base 10: mod_base = OTHER; note = 2'-fluoroguanosine
  modified_base 13: mod_base = OTHER; note = 2'-Omethylcytosine
  modified_base 15: mod_base = OTHER; note = 2'-Omethyladenosine
  modified_base 16: mod_base = OTHER; note = 2'-fluorouridine
  modified_base 17: mod_base = OTHER; note = Guanosine phosphorothiorate
  modified_base 18: mod_base = OTHER; note = 2'-fluoroguanosine
  modified_base 22: mod_base = OTHER; note = 2'-Omethylguanosine
  modified_base 24: mod_base = OTHER; note = 2'-Omethylguanosine
  modified_base 25: mod_base = OTHER; note = 2'-fluorocytosine
  modified_base 26: mod_base = OTHER; note = Adenosine phosphorothiorate
  modified_base 27: mod_base = OTHER; note = 2'-fluorouridine
  modified_base 28: mod_base = OTHER; note = 2'-fluorouridine
  modified_base 30: mod_base = OTHER; note = 2'-Omethylguanosine
  modified_base 34: mod_base = OTHER; note = 2'-Omethyluridine
  modified_base 38: mod_base = OTHER; note = 2'-fluoroadenosine
  modified_base 39: mod_base = OTHER; note = Uridine phosphorothiorate
  modified_base 41: mod_base = OTHER; note = 2'-Omethylcytosine
  modified_base 43: mod_base = OTHER; note = 2'-fluoroadenosine phosphorothiorate
  modified_base 44: mod_base = OTHER; note = 2'-fluoroadenosine
  modified_base 46: mod_base = OTHER; note = 2'-fluoroguanosine
  modified_base 47: mod_base = OTHER; note = 2'-fluorouridine
  modified_base 49: mod_base = OTHER; note = 2'-fluorocytosine
  modified_base 53: mod_base = OTHER; note = Guanosine phosphorothiorate
  modified_base 55: mod_base = OTHER; note = Uridine phosphorothiorate
  modified_base 58: mod_base = OTHER; note = Adenosine phosphorothiorate
  modified_base 59: mod_base = OTHER; note = Guanosine phosphorothiorate
  modified_base 60: mod_base = OTHER; note = 2'-Omethyluridine
  modified_base 63: mod_base = OTHER; note = 2'-fluorocytosine
  modified_base 65: mod_base = OTHER; note = 2'-fluoroguanosine
  modified_base 69: mod_base = OTHER; note = Adenosine phosphorothiorate
  modified_base 70: mod_base = OTHER; note = 2'-fluoroguanosine
  modified_base 71: mod_base = OTHER; note = Uridine phosphorothiorate
  modified_base 72: mod_base = OTHER; note = Cytosine phosphorothiorate
  modified_base 75: mod_base = OTHER; note = Cytosine phosphorothiorate
  modified_base 76: mod_base = OTHER; note = 2'-Omethyladenosine

SEQ ID NO: 9166 - RNA, 76 nt, synthetic construct; identical to SEQ ID NO: 625
  source 1..76: mol_type = other RNA
  modified_base 1: mod_base = OTHER; note = 2'-Omethylguanosine
  modified_base 5: mod_base = OTHER; note = 2'-Omethylcytosine
  modified_base 10: mod_base = OTHER; note = 2'-Omethylguanosine
  modified_base 13: mod_base = OTHER; note = 2'-Omethylcytosine
  modified_base 17: mod_base = OTHER; note = Guanosine phosphorothiorate
  modified_base 18: mod_base = OTHER; note = 2'-Omethylguanosine
  modified_base 19: mod_base = OTHER; note = Adenosine phosphorothiorate
  modified_base 20: mod_base = OTHER; note = 2'-Omethyluridine
  modified_base 25: mod_base = OTHER; note = 2'-Omethylcytosine
  modified_base 29: mod_base = OTHER; note = 2'-Omethylguanosine
  modified_base 33: mod_base = OTHER; note = 2'-fluorouridine
  modified_base 35: mod_base = OTHER; note = Cytosine phosphorothiorate
  modified_base 37: mod_base = OTHER; note = Adenosine phosphorothiorate
  modified_base 38: mod_base = OTHER; note = Adenosine phosphorothiorate
  modified_base 43: mod_base = OTHER; note = 2'-Omethyladenosine
  modified_base 44: mod_base = OTHER; note = 2'-fluoroadenosine
  modified_base 46: mod_base = OTHER; note = Guanosine phosphorothiorate
  modified_base 50: mod_base = OTHER; note = 2'-Omethylcytosine
  modified_base 52: mod_base = OTHER; note = 2'-Omethylguanosine
  modified_base 54: mod_base = OTHER; note = Uridine phosphorothiorate
  modified_base 55: mod_base = OTHER; note = Uridine phosphorothiorate
  modified_base 56: mod_base = OTHER; note = 2'-Omethylcytosine
  modified_base 57: mod_base = OTHER; note = Guanosine phosphorothiorate
  modified_base 62: mod_base = OTHER; note = 2'-Omethylcytosine
  modified_base 63: mod_base = OTHER; note = 2'-fluorocytosine
  modified_base 65: mod_base = OTHER; note = 2'-Omethylguanosine
  modified_base 71: mod_base = OTHER; note = 2'-Omethyluridine
  modified_base 73: mod_base = OTHER; note = 2'-Omethylguanosine

SEQ ID NO: 9167 - RNA, 75 nt, synthetic construct; identical to SEQ ID NO: 1045
  source 1..75: mol_type = other RNA
  modified_base 1: mod_base = OTHER; note = 2'-Omethylguanosine
  modified_base 2: mod_base = OTHER; note = 2'-Omethylguanosine
  modified_base 3: mod_base = OTHER; note = 2'-Omethyluridine
  modified_base 4: mod_base = OTHER; note = 2'-Omethyluridine
  modified_base 5: mod_base = OTHER; note = 2'-Omethylcytosine
  modified_base 6: mod_base = OTHER; note = 2'-Omethylcytosine
  modified_base 10: mod_base = OTHER; note = 2'-Omethylguanosine
  modified_base 11: mod_base = OTHER; note = 2'-Omethyluridine
  modified_base 12: mod_base = OTHER; note = 2'-Omethylguanosine
  modified_base 13: mod_base = OTHER; note = 2'-Omethyluridine
  modified_base 14: mod_base = OTHER; note = 2'-Omethyladenosine
  modified_base 15: mod_base = OTHER; note = 2'-Omethyladenosine
  modified_base 16: mod_base = OTHER; note = 2'-Omethyluridine
  modified_base 17: mod_base = OTHER; note = 2'-Omethylguanosine
  modified_base 18: mod_base = OTHER; note = 2'-Omethylguanosine
  modified_base 20: mod_base = OTHER; note = 2'-Omethyladenosine
  modified_base 22: mod_base = OTHER; note = 2'-Omethylguanosine
  modified_base 23: mod_base = OTHER; note = 2'-Omethylcytosine
  modified_base 24: mod_base = OTHER; note = 2'-Omethyladenosine
  modified_base 25: mod_base = OTHER; note = 2'-Omethylcytosine
  modified_base 41: mod_base = OTHER; note = 2'-Omethylcytosine
  modified_base 42: mod_base = OTHER; note = 2'-Omethyladenosine
  modified_base 43: mod_base = OTHER; note = 2'-Omethylguanosine
  modified_base 44: mod_base = OTHER; note = 2'-Omethylcytosine
  modified_base 48: mod_base = OTHER; note = 2'-Omethylcytosine
  modified_base 49: mod_base = OTHER; note = 2'-Omethylcytosine
  modified_base 51: mod_base = OTHER; note = 2'-Omethyladenosine
  modified_base 53: mod_base = OTHER; note = 2'-Omethyluridine
  modified_base 54: mod_base = OTHER; note = Uridine phosphorothiorate
  modified_base 55: mod_base = OTHER; note = 2'-Omethylcytosine
  modified_base 56: mod_base = OTHER; note = 2'-fluoroguanosine
  modified_base 58: mod_base = OTHER; note = 2'-Omethylguanosine
  modified_base 60: mod_base = OTHER; note = 2'-Omethylcytosine
  modified_base 64: mod_base = OTHER; note = 2'-Omethylguanosine
  modified_base 72: mod_base = OTHER; note = 2'-Omethyluridine

SEQ ID NO: 9168 - RNA, 85 nt, synthetic construct; identical to SEQ ID NO: 3297
  source 1..85: mol_type = other RNA
  modified_base 1: mod_base = OTHER; note = 2'-Omethylguanosine
  modified_base 2: mod_base = OTHER; note = 2'-Omethylcytosine
  modified_base 3: mod_base = OTHER; note = 2'-Omethyluridine
  modified_base 4: mod_base = OTHER; note = 2'-Omethylguanosine
  modified_base 5: mod_base = OTHER; note = 2'-Omethyluridine
  modified_base 6: mod_base = OTHER; note = 2'-Omethylguanosine
  modified_base 10: mod_base = OTHER; note = 2'-Omethylguanosine
  modified_base 11: mod_base = OTHER; note = 2'-Omethylcytosine
  modified_base 12: mod_base = OTHER; note = 2'-Omethylcytosine
  modified_base 13: mod_base = OTHER; note = 2'-Omethylguanosine
  modified_base 14: mod_base = OTHER; note = 2'-Omethyladenosine
  modified_base 15: mod_base = OTHER; note = 2'-fluoroguanosine
  modified_base 16: mod_base = OTHER; note = 2'-Omethyluridine
  modified_base 17: mod_base = OTHER; note = 2'-Omethylguanosine
  modified_base 18: mod_base = OTHER; note = 2'-Omethylguanosine
  modified_base 19: mod_base = OTHER; note = 2'-fluorouridine
  modified_base 20: mod_base = OTHER; note = 2'-Omethyluridine
  modified_base 22: mod_base = OTHER; note = 2'-Omethyladenosine
  modified_base 23: mod_base = OTHER; note = 2'-Omethylguanosine
  modified_base 24: mod_base = OTHER; note = 2'-Omethylguanosine
  modified_base 25: mod_base = OTHER; note = 2'-Omethylcytosine
  modified_base 33: mod_base = OTHER; note = 2'-fluorouridine
  modified_base 35: mod_base = OTHER; note = Cytosine phosphorothiorate
  modified_base 37: mod_base = OTHER; note = Adenosine phosphorothiorate
  modified_base 38: mod_base = OTHER; note = Adenosine phosphorothiorate
  modified_base 41: mod_base = OTHER; note = 2'-Omethylcytosine
  modified_base 42: mod_base = OTHER; note = 2'-Omethyladenosine
  modified_base 43: mod_base = OTHER; note = 2'-Omethyladenosine
  modified_base 44: mod_base = OTHER; note = 2'-Omethyluridine
  modified_base 58: mod_base = OTHER; note = 2'-Omethylguanosine
  modified_base 59: mod_base = OTHER; note = 2'-Omethylcytosine
  modified_base 61: mod_base = OTHER; note = 2'-Omethylguanosine
  modified_base 63: mod_base = OTHER; note = 2'-Omethyluridine
  modified_base 64: mod_base = OTHER; note = Uridine phosphorothiorate
  modified_base 65: mod_base = OTHER; note = 2'-Omethylcytosine
  modified_base 66: mod_base = OTHER; note = 2'-fluoroguanosine
  modified_base 68: mod_base = OTHER; note = 2'-Omethyladenosine
  modified_base 70: mod_base = OTHER; note = 2'-Omethylcytosine
  modified_base 74: mod_base = OTHER; note = 2'-Omethylcytosine
  modified_base 82: mod_base = OTHER; note = 2'-Omethylguanosine

SEQ ID NO: 9169 - RNA, 73 nt, synthetic construct; identical to SEQ ID NO: 935
  source 1..73: mol_type = other RNA
  modified_base 1: mod_base = OTHER; note = 2'-Omethylguanosine phosphorothiorate
  modified_base 2: mod_base = OTHER; note = 2'-Omethylguanosine
  modified_base 72: mod_base = OTHER; note = 2'-Omethylcytosine phosphorothiorate

SEQ ID NO: 9170 - RNA, 76 nt, synthetic construct; identical to SEQ ID NO: 3295
  source 1..76: mol_type = other RNA
  modified_base 1: mod_base = OTHER; note = 2'-Omethylcytosine
  modified_base 2: mod_base = OTHER; note = 2'-Omethylcytosine
  modified_base 3: mod_base = OTHER; note = 2'-Omethyluridine
  modified_base 4: mod_base = OTHER; note = 2'-fluorouridine
  modified_base 5: mod_base = OTHER; note = 2'-Omethylcytosine
  modified_base 6: mod_base = OTHER; note = 2'-fluoroguanosine
  modified_base 7: mod_base = OTHER; note = 2'-Omethyladenosine phosphorothiorate
  modified_base 8: mod_base = OTHER; note = 2'-fluorouridine
  modified_base 9: mod_base = OTHER; note = 2'-fluoroadenosine
  modified_base 10: mod_base = OTHER; note = 2'-fluoroguanosine phosphorothiorate
  modified_base 12: mod_base = OTHER; note = 2'-Omethyluridine
  modified_base 17: mod_base = OTHER; note = 2'-Omethyluridine
  modified_base 25: mod_base = OTHER; note = Cytosine phosphorothiorate
  modified_base 26: mod_base = OTHER; note = 2'-Omethylguanosine
  modified_base 27: mod_base = OTHER; note = 2'-fluoroguanosine phosphorothiorate
  modified_base 28: mod_base = OTHER; note = 2'-fluoroadenosine phosphorothiorate
  modified_base 37: mod_base = OTHER; note = 2'-Omethylguanosine phosphorothiorate
  modified_base 38: mod_base = OTHER; note = 2'-fluoroadenosine
  modified_base 43: mod_base = OTHER; note = 2'-fluorouridine phosphorothiorate
  modified_base 49: mod_base = OTHER; note = 2'-Omethylguanosine
  modified_base 52: mod_base = OTHER; note = 2'-Omethylguanosine phosphorothiorate
  modified_base 53: mod_base = OTHER; note = 2'-Omethylguanosine
  modified_base 66: mod_base = OTHER; note = 2'-Omethyluridine phosphorothiorate
  modified_base 74: mod_base = OTHER; note = 2'-Omethylcytosine phosphorothiorate
  modified_base 75: mod_base = OTHER; note = 2'-fluorocytosine
  modified_base 76: mod_base = OTHER; note = 2'-fluoroadenosine

SEQ ID NO: 9171 - RNA, 76 nt, synthetic construct; identical to SEQ ID NO: 3795
  source 1..76: mol_type = other RNA
  modified_base 1: mod_base = OTHER; note = 2'-Omethylguanosine phosphorothiorate
  modified_base 2: mod_base = OTHER; note = 2'-Omethylcytosine phosphorothiorate
  modified_base 3: mod_base = OTHER; note = 2'-Omethylcytosine
  modified_base 4: mod_base = OTHER; note = 2'-Omethyluridine
  modified_base 5: mod_base = OTHER; note = 2'-Omethylcytosine
  modified_base 6: mod_base = OTHER; note = 2'-Omethylcytosine
  modified_base 10: mod_base = OTHER; note = 2'-Omethylguanosine
  modified_base 11: mod_base = OTHER; note = 2'-Omethylcytosine
  modified_base 12: mod_base = OTHER; note = 2'-Omethylcytosine
  modified_base 13: mod_base = OTHER; note = 2'-Omethyluridine
  modified_base 17: mod_base = OTHER; note = 2'-Omethylguanosine
  modified_base 18: mod_base = OTHER; note = 2'-Omethylguanosine
  modified_base 22: mod_base = OTHER; note = 2'-Omethyladenosine
  modified_base 23: mod_base = OTHER; note = 2'-Omethylguanosine
  modified_base 24: mod_base = OTHER; note = 2'-Omethylguanosine
  modified_base 25: mod_base = OTHER; note = 2'-Omethylcytosine
  modified_base 33: mod_base = OTHER; note = 2'-fluorouridine
  modified_base 35: mod_base = OTHER; note = Cytosine phosphorothiorate
  modified_base 37: mod_base = OTHER; note = Adenosine phosphorothiorate
  modified_base 38: mod_base = OTHER; note = Adenosine phosphorothiorate
  modified_base 41: mod_base = OTHER; note = 2'-fluorocytosine
  modified_base 42: mod_base = OTHER; note = 2'-Omethylguanosine
  modified_base 43: mod_base = OTHER; note = 2'-Omethylguanosine
  modified_base 44: mod_base = OTHER; note = 2'-fluoroguanosine
  modified_base 49: mod_base = OTHER; note = 2'-Omethylguanosine
  modified_base 50: mod_base = OTHER; note = 2'-Omethylcytosine
  modified_base 51: mod_base = OTHER; note = 2'-Omethylguanosine
  modified_base 52: mod_base = OTHER; note = 2'-Omethylguanosine
  modified_base 53: mod_base = OTHER; note = 2'-Omethylguanosine
  modified_base 54: mod_base = OTHER; note = Uridine phosphorothiorate
  modified_base 55: mod_base = OTHER; note = Uridine phosphorothiorate
  modified_base 61: mod_base = OTHER; note = 2'-Omethylcytosine
  modified_base 62: mod_base = OTHER; note = 2'-Omethylcytosine
  modified_base 63: mod_base = OTHER; note = 2'-fluorocytosine
  modified_base 64: mod_base = OTHER; note = 2'-Omethylguanosine
  modified_base 65: mod_base = OTHER; note = 2'-Omethyluridine
  modified_base 66: mod_base = OTHER; note = 2'-Omethylcytosine
  modified_base 67: mod_base = OTHER; note = 2'-Omethylguanosine
  modified_base 68: mod_base = OTHER; note = 2'-Omethylguanosine
  modified_base 73: mod_base = OTHER; note = 2'-Omethylguanosine

SEQ ID NO: 9172 - RNA, 75 nt, synthetic construct; identical to SEQ ID NO: 3299
  source 1..75: mol_type = other RNA
  modified_base 1: mod_base = OTHER; note = Cytosine phosphorothiorate
  modified_base 18: mod_base = OTHER; note = 2'-fluoroguanosine
  modified_base 21: mod_base = OTHER; note = Guanosine phosphorothiorate
  modified_base 39: mod_base = OTHER; note = 2'-fluorocytosine
  modified_base 46: mod_base = OTHER; note = 2'-fluorouridine
  modified_base 47: mod_base = OTHER; note = Cytosine phosphorothiorate
  modified_base 52: mod_base = OTHER; note = 2'-fluoroguanosine
  modified_base 53: mod_base = OTHER; note = 2'-fluorouridine
  modified_base 63: mod_base = OTHER; note = Uridine phosphorothiorate
  modified_base 70: mod_base = OTHER; note = Guanosine phosphorothiorate
  modified_base 73: mod_base = OTHER; note = Cytosine phosphorothiorate
  modified_base 74: mod_base = OTHER; note = Cytosine phosphorothiorate

SEQ ID NO: 9173 - RNA, 75 nt, synthetic construct; identical to SEQ ID NO: 3306
  source 1..75: mol_type = other RNA
  modified_base 1: mod_base = OTHER; note = 2'-Omethylguanosine phosphorothiorate
  modified_base 2: mod_base = OTHER; note = 2'-Omethyladenosine phosphorothiorate
  modified_base 12: mod_base = OTHER; note = Guanosine phosphorothiorate
  modified_base 13: mod_base = OTHER; note = 2'-Omethylcytosine
  modified_base 73: mod_base = OTHER; note = Cytosine phosphorothiorate
  modified_base 74: mod_base = OTHER; note = 2'-Omethylcytosine phosphorothiorate
  modified_base 75: mod_base = OTHER; note = 2'-Omethyladenosine

SEQ ID NO: 9174 - RNA, 76 nt, synthetic construct; identical to SEQ ID NO: 3342
  source 1..76: mol_type = other RNA
  modified_base 1: mod_base = OTHER; note = 2'-Omethylguanosine phosphorothiorate
  modified_base 2: mod_base = OTHER; note = 2'-Omethylguanosine phosphorothiorate
  modified_base 3: mod_base = OTHER; note = 2'-Omethylcytosine
  modified_base 4: mod_base = OTHER; note = 2'-Omethyluridine
  modified_base 5: mod_base = OTHER; note = 2'-Omethylcytosine
  modified_base 6: mod_base = OTHER; note = 2'-Omethylcytosine
  modified_base 10: mod_base = OTHER; note = 2'-Omethylguanosine
  modified_base 11: mod_base = OTHER; note = 2'-Omethylcytosine
  modified_base 12: mod_base = OTHER; note = 2'-Omethylguanosine
  modified_base 13: mod_base = OTHER; note = 2'-Omethylcytosine
  modified_base 22: mod_base = OTHER; note = 2'-Omethylguanosine
  modified_base 23: mod_base = OTHER; note = 2'-Omethylcytosine
  modified_base 24: mod_base = OTHER; note = 2'-Omethylguanosine
  modified_base 25: mod_base = OTHER; note = 2'-Omethylcytosine
  modified_base 49: mod_base = OTHER; note = 2'-Omethylcytosine
  modified_base 50: mod_base = OTHER; note = 2'-Omethylcytosine
  modified_base 51: mod_base = OTHER; note = 2'-Omethylguanosine
  modified_base 52: mod_base = OTHER; note = 2'-Omethylguanosine
  modified_base 53: mod_base = OTHER; note = 2'-Omethylguanosine
  modified_base 54: mod_base = OTHER; note = 2'-Omethyluridine
  modified_base 61: mod_base = OTHER; note = 2'-Omethylcytosine
  modified_base 62: mod_base = OTHER; note = 2'-Omethylcytosine
  modified_base 63: mod_base = OTHER; note = 2'-fluorocytosine
  modified_base 64: mod_base = OTHER; note = 2'-Omethylguanosine
  modified_base 65: mod_base = OTHER; note = 2'-Omethylguanosine
  modified_base 66: mod_base = OTHER; note = 2'-Omethylcytosine
  modified_base 67: mod_base = OTHER; note = 2'-Omethylguanosine
  modified_base 68: mod_base = OTHER; note = 2'-Omethylguanosine
  modified_base 73: mod_base = OTHER; note = 2'-Omethylguanosine

SEQ ID NO: 9175 - RNA, 76 nt, synthetic construct; identical to SEQ ID NO: 625
  source 1..76: mol_type = other RNA
  modified_base 1: mod_base = OTHER; note = 2'-Omethylguanosine phosphorothiorate
  modified_base 2: mod_base = OTHER; note = 2'-Omethylguanosine
  modified_base 18: mod_base = OTHER; note = 2'-Omethylguanosine
  modified_base 33: mod_base = OTHER; note = 2'-fluorouridine
  modified_base 35: mod_base = OTHER; note = Cytosine phosphorothiorate
  modified_base 37: mod_base = OTHER; note = Adenosine phosphorothiorate
  modified_base 38: mod_base = OTHER; note = Adenosine phosphorothiorate
  modified_base 52: mod_base = OTHER; note = 2'-Omethylguanosine
  modified_base 57: mod_base = OTHER; note = 2'-Omethylguanosine
  modified_base 73: mod_base = OTHER; note = 2'-Omethylguanosine
  modified_base 75: mod_base = OTHER; note = 2'-fluorocytosine phosphorothiorate

SEQ ID NO: 9176 - RNA, 75 nt, synthetic construct; identical to SEQ ID NO: 3311
  source 1..75: mol_type = other RNA
  modified_base 1: mod_base = OTHER; note = Guanosine phosphorothiorate
  modified_base 2: mod_base = OTHER; note = 2'-Omethylguanosine phosphorothiorate
  modified_base 15: mod_base = OTHER; note = 2'-fluoroadenosine
  modified_base 16: mod_base = OTHER; note = 2'-fluorouridine phosphorothiorate
  modified_base 19: mod_base = OTHER; note = Uridine phosphorothiorate
  modified_base 21: mod_base = OTHER; note = Adenosine phosphorothiorate
  modified_base 22: mod_base = OTHER; note = 2'-fluoroguanosine
  modified_base 23: mod_base = OTHER; note = Cytosine phosphorothiorate
  modified_base 24: mod_base = OTHER; note = 2'-fluoroadenosine
  modified_base 33: mod_base = OTHER; note = 2'-fluorouridine
  modified_base 38: mod_base = OTHER; note = 2'-fluoroadenosine
  modified_base 39: mod_base = OTHER; note = Uridine phosphorothiorate
  modified_base 42: mod_base = OTHER; note = 2'-fluoroadenosine
  modified_base 50: mod_base = OTHER; note = 2'-fluoroguanosine
  modified_base 57: mod_base = OTHER; note = 2'-fluoroadenosine
  modified_base 58: mod_base = OTHER; note = 2'-fluoroguanosine
  modified_base 61: mod_base = OTHER; note = 2'-Omethyluridine
  modified_base 62: mod_base = OTHER; note = 2'-fluorocytosine
  modified_base 67: mod_base = OTHER; note = Guanosine phosphorothiorate
  modified_base 68: mod_base = OTHER; note = Adenosine phosphorothiorate
  modified_base 73: mod_base = OTHER; note = Cytosine phosphorothiorate
  modified_base 74: mod_base = OTHER; note = 2'-fluorocytosine phosphorothiorate

SEQ ID NO: 9177 - RNA, 76 nt, synthetic construct; identical to SEQ ID NO: 3318
  source 1..76: mol_type = other RNA
  modified_base 1: mod_base = OTHER; note = 2'-Omethylcytosine phosphorothiorate
  modified_base 2: mod_base = OTHER; note = 2'-Omethylcytosine phosphorothiorate
  modified_base 3: mod_base = OTHER; note = 2'-Omethyluridine
  modified_base 4: mod_base = OTHER; note = 2'-Omethyluridine
  modified_base 5: mod_base = OTHER; note = 2'-Omethylcytosine
  modified_base 6: mod_base = OTHER; note = 2'-Omethylguanosine
  modified_base 10: mod_base = OTHER; note = 2'-Omethylguanosine
  modified_base 11: mod_base = OTHER; note = 2'-Omethylcytosine
  modified_base 12: mod_base = OTHER; note = 2'-Omethyluridine
  modified_base 13: mod_base = OTHER; note = 2'-Omethylcytosine
  modified_base 14: mod_base = OTHER; note = 2'-Omethyladenosine
  modified_base 15: mod_base = OTHER; note = 2'-fluoroguanosine
  modified_base 16: mod_base = OTHER; note = 2'-Omethyluridine
  modified_base 18: mod_base = OTHER; note = 2'-Omethylguanosine
  modified_base 19: mod_base = OTHER; note = 2'-Omethylguanosine
  modified_base 20: mod_base = OTHER; note = 2'-fluorouridine
  modified_base 33: mod_base = OTHER; note = 2'-fluorouridine
  modified_base 35: mod_base = OTHER; note = Uridine phosphorothiorate
  modified_base 37: mod_base = OTHER; note = Guanosine phosphorothiorate
  modified_base 38: mod_base = OTHER; note = Adenosine phosphorothiorate
  modified_base 44: mod_base = OTHER; note = 2'-Omethyladenosine
  modified_base 45: mod_base = OTHER; note = 2'-Omethylguanosine
  modified_base 46: mod_base = OTHER; note = 2'-fluoroguanosine
  modified_base 47: mod_base = OTHER; note = 2'-fluorouridine
  modified_base 48: mod_base = OTHER; note = 2'-fluorocytosine
  modified_base 56: mod_base = OTHER; note = 2'-Omethylcytosine
  modified_base 59: mod_base = OTHER; note = 2'-Omethyladenosine
  modified_base 61: mod_base = OTHER; note = 2'-Omethylcytosine
  modified_base 62: mod_base = OTHER; note = 2'-Omethylcytosine
  modified_base 63: mod_base = OTHER; note = 2'-fluoroguanosine
  modified_base 64: mod_base = OTHER; note = 2'-Omethylguanosine
  modified_base 65: mod_base = OTHER; note = 2'-Omethylcytosine
  modified_base 66: mod_base = OTHER; note = 2'-Omethyluridine
  modified_base 67: mod_base = OTHER; note = 2'-Omethylcytosine
  modified_base 68: mod_base = OTHER; note = 2'-Omethylguanosine
  modified_base 73: mod_base = OTHER; note = 2'-Omethyladenosine

SEQ ID NO: 9178 - RNA, 86 nt, synthetic construct; identical to SEQ ID NO: 3290
  source 1..86: mol_type = other RNA
  modified_base 10: mod_base = OTHER; note = 2'-Omethylguanosine
  modified_base 11: mod_base = OTHER; note = 2'-Omethylcytosine
  modified_base 12: mod_base = OTHER; note = 2'-Omethylcytosine
  modified_base 13: mod_base = OTHER; note = 2'-Omethylguanosine
  modified_base 59: mod_base = OTHER; note = 2'-Omethylguanosine
  modified_base 60: mod_base = OTHER; note = 2'-Omethyluridine
  modified_base 61: mod_base = OTHER; note = 2'-Omethylguanosine
  modified_base 62: mod_base = OTHER; note = 2'-Omethylguanosine
  modified_base 63: mod_base = OTHER; note = 2'-Omethylguanosine
  modified_base 83: mod_base = OTHER; note = 2'-Omethyladenosine

SEQ ID NO: 9179 - RNA, 76 nt, synthetic construct; identical to SEQ ID NO: 625
  source 1..76: mol_type = other RNA
  modified_base 1: mod_base = OTHER; note = 2'-Omethylguanosine phosphorothiorate
  modified_base 2: mod_base = OTHER; note = 2'-Omethylguanosine
  modified_base 3: mod_base = OTHER; note = 2'-Omethylcytosine
  modified_base 13: mod_base = OTHER; note = 2'-Omethylcytosine
  modified_base 33: mod_base = OTHER; note = 2'-fluorouridine
  modified_base 35: mod_base = OTHER; note = Cytosine phosphorothiorate
  modified_base 37: mod_base = OTHER; note = Adenosine phosphorothiorate
  modified_base 38: mod_base = OTHER; note = Adenosine phosphorothiorate
  modified_base 52: mod_base = OTHER; note = 2'-Omethylguanosine
  modified_base 62: mod_base = OTHER; note = 2'-Omethylcytosine
  modified_base 63: mod_base = OTHER; note = 2'-fluorocytosine
  modified_base 73: mod_base = OTHER; note = 2'-Omethylguanosine
  modified_base 75: mod_base = OTHER; note = 2'-fluorocytosine phosphorothiorate
  modified_base 76: mod_base = OTHER; note = 2'-Omethyladenosine

SEQ ID NO: 9180 - RNA, 75 nt, synthetic construct; identical to SEQ ID NO: 3336
  source 1..75: mol_type = other RNA
  modified_base 15: mod_base = OTHER; note = 2'-fluorouridine
  modified_base 19: mod_base = OTHER; note = 2'-Omethyluridine phosphorothiorate
  modified_base 20: mod_base = OTHER; note = Adenosine phosphorothiorate
  modified_base 26: mod_base = OTHER; note = 2'-fluorouridine
  modified_base 28: mod_base = OTHER; note = Adenosine phosphorothiorate
  modified_base 36: mod_base = OTHER; note = 2'-fluoroadenosine
  modified_base 42: mod_base = OTHER; note = 2'-fluoroadenosine
  modified_base 46: mod_base = OTHER; note = 2'-fluorouridine
  modified_base 49: mod_base = OTHER; note = 2'-fluoroadenosine
  modified_base 55: mod_base = OTHER; note = 2'-Omethylcytosine phosphorothiorate
  modified_base 72: mod_base = OTHER; note = Guanosine phosphorothiorate

SEQ ID NO: 9181 - RNA, 76 nt, synthetic construct; identical to SEQ ID NO: 625
  source 1..76: mol_type = other RNA
  modified_base 1: mod_base = OTHER; note = 2'-Omethylguanosine phosphorothiorate
  modified_base 2: mod_base = OTHER; note = 2'-Omethylguanosine
  modified_base 17: mod_base = OTHER; note = 2'-Omethylguanosine
  modified_base 33: mod_base = OTHER; note = 2'-fluorouridine
  modified_base 35: mod_base = OTHER; note = Cytosine phosphorothiorate
  modified_base 37: mod_base = OTHER; note = Adenosine phosphorothiorate
  modified_base 52: mod_base = OTHER; note = 2'-Omethylguanosine
  modified_base 57: mod_base = OTHER; note = 2'-Omethylguanosine
  modified_base 73: mod_base = OTHER; note = 2'-Omethylguanosine
  modified_base 75: mod_base = OTHER; note = 2'-fluorocytosine phosphorothiorate

SEQ ID NO: 9182 - RNA, 76 nt, synthetic construct; identical to SEQ ID NO: 3318
  source 1..76: mol_type = other RNA
  modified_base 1: mod_base = OTHER; note = 2'-Omethylcytosine phosphorothiorate
  modified_base 2: mod_base = OTHER; note = 2'-Omethylcytosine
  modified_base 13: mod_base = OTHER; note = Cytosine phosphorothiorate
  modified_base 14: mod_base = OTHER; note = 2'-Omethyladenosine
  modified_base 55: mod_base = OTHER; note = Uridine phosphorothiorate
  modified_base 74: mod_base = OTHER; note = Cytosine phosphorothiorate
  modified_base 75: mod_base = OTHER; note = 2'-Omethylcytosine

SEQ ID NO: 9183 - RNA, 74 nt, synthetic construct; identical to SEQ ID NO: 3293
  source 1..74: mol_type = other RNA
  modified_base 4: mod_base = OTHER; note = 2'-Omethyluridine
  modified_base 27: mod_base = OTHER; note = 2'-Omethyluridine
  modified_base 41: mod_base = OTHER; note = 2'-fluoroadenosine
  modified_base 49: mod_base = OTHER; note = 2'-fluoroguanosine
  modified_base 62: mod_base = OTHER; note = 2'-fluoroguanosine

SEQ ID NO: 9184 - RNA, 85 nt, synthetic construct; identical to SEQ ID NO: 3297
  source 1..85: mol_type = other RNA
  modified_base 1: mod_base = OTHER; note = 2'-Omethylguanosine phosphorothiorate
  modified_base 2: mod_base = OTHER; note = 2'-Omethylcytosine phosphorothiorate
  modified_base 83: mod_base = OTHER; note = 2'-Omethylcytosine phosphorothiorate
  modified_base 84: mod_base = OTHER; note = 2'-Omethylcytosine phosphorothiorate

SEQ ID NO: 9185 - RNA, 76 nt, synthetic construct; identical to SEQ ID NO: 625
  source 1..76: mol_type = other RNA
  modified_base 1: mod_base = OTHER; note = 2'-Omethylguanosine phosphorothiorate
  modified_base 2: mod_base = OTHER; note = 2'-Omethylguanosine
  modified_base 18: mod_base = OTHER; note = 2'-Omethylguanosine
  modified_base 33: mod_base = OTHER; note = 2'-fluorouridine
  modified_base 35: mod_base = OTHER; note = Cytosine phosphorothiorate
  modified_base 37: mod_base = OTHER; note = Adenosine phosphorothiorate
  modified_base 38: mod_base = OTHER; note = Adenosine phosphorothiorate
  modified_base 52: mod_base = OTHER; note = 2'-Omethylguanosine
  modified_base 57: mod_base = OTHER; note = 2'-Omethylguanosine
  modified_base 62: mod_base = OTHER; note = 2'-Omethylcytosine
  modified_base 73: mod_base = OTHER; note = 2'-Omethylguanosine
  modified_base 75: mod_base = OTHER; note = 2'-fluorocytosine phosphorothiorate

SEQ ID NO: 9186 - RNA, 85 nt, synthetic construct; identical to SEQ ID NO: 3297
  source 1..85: mol_type = other RNA
  modified_base 1: mod_base = OTHER; note = 2'-Omethylguanosine phosphorothiorate
  modified_base 2: mod_base = OTHER; note = 2'-Omethylcytosine
  modified_base 10: mod_base = OTHER; note = Guanosine phosphorothiorate
  modified_base 28: mod_base = OTHER; note = 2'-fluorouridine
  modified_base 33: mod_base = OTHER; note = 2'-fluorouridine
  modified_base 44: mod_base = OTHER; note = 2'-Omethyluridine phosphorothiorate
  modified_base 54: mod_base = OTHER; note = 2'-Omethylcytosine
  modified_base 82: mod_base = OTHER; note = 2'-Omethylguanosine

SEQ ID NO: 9187 - RNA, 74 nt, synthetic construct; identical to SEQ ID NO: 3293
  source 1..74: mol_type = other RNA
  modified_base 1: mod_base = OTHER; note = Adenosine phosphorothiorate
  modified_base 3: mod_base = OTHER; note = 2'-Omethylcytosine
  modified_base 7: mod_base = OTHER; note = Uridine phosphorothiorate
  modified_base 9: mod_base = OTHER; note = 2'-fluoroguanosine
  modified_base 11: mod_base = OTHER; note = 2'-Omethylguanosine
  modified_base 26: mod_base = OTHER; note = 2'-Omethylcytosine phosphorothiorate
  modified_base 33: mod_base = OTHER; note = 2'-fluorouridine phosphorothiorate
  modified_base 44: mod_base = OTHER; note = Guanosine phosphorothiorate
  modified_base 50: mod_base = OTHER; note = Uridine phosphorothiorate
  modified_base 52: mod_base = OTHER; note = 2'-fluorouridine
  modified_base 55: mod_base = OTHER; note = 2'-Omethyladenosine
  modified_base 62: mod_base = OTHER; note = 2'-fluoroguanosine
  modified_base 67: mod_base = OTHER; note = Guanosine phosphorothiorate
  modified_base 73: mod_base = OTHER; note = 2'-Omethylcytosine phosphorothiorate

SEQ ID NO: 9188 - RNA, 75 nt, synthetic construct; identical to SEQ ID NO: 1045
  source 1..75: mol_type = other RNA
  modified_base 2: mod_base = OTHER; note = 2'-Omethylguanosine
  modified_base 3: mod_base = OTHER; note = Uridine phosphorothiorate
  modified_base 5: mod_base = OTHER; note = 2'-Omethylcytosine phosphorothiorate
  modified_base 10: mod_base = OTHER; note = 2'-Omethylguanosine
  modified_base 15: mod_base = OTHER; note = 2'-Omethyladenosine phosphorothiorate
  modified_base 16: mod_base = OTHER; note = 2'-Omethyluridine phosphorothiorate
  modified_base 17: mod_base = OTHER; note = 2'-Omethylguanosine
  modified_base 18: mod_base = OTHER; note = 2'-Omethylguanosine phosphorothiorate
  modified_base 30: mod_base = OTHER; note = 2'-Omethylguanosine
  modified_base 50: mod_base = OTHER; note = 2'-Omethylguanosine
  modified_base 55: mod_base = OTHER; note = 2'-fluorocytosine phosphorothiorate
  modified_base 56: mod_base = OTHER; note = Guanosine phosphorothiorate
  modified_base 72: mod_base = OTHER; note = 2'-Omethyluridine
  modified_base 73: mod_base = OTHER; note = Cytosine phosphorothiorate
  modified_base 74: mod_base = OTHER; note = 2'-Omethylcytosine phosphorothiorate
  modified_base 75: mod_base = OTHER; note = 2'-Omethyladenosine

SEQ ID NO: 9189 - RNA, 76 nt, synthetic construct; identical to SEQ ID NO: 625
  source 1..76: mol_type = other RNA
  modified_base 1: mod_base = OTHER; note = 2'-Omethylguanosine
  modified_base 2: mod_base = OTHER; note = 2'-Omethylguanosine
  modified_base 3: mod_base = OTHER; note = 2'-Omethylcytosine
  modified_base 4: mod_base = OTHER; note = 2'-Omethyluridine
  modified_base 5: mod_base = OTHER; note = 2'-Omethylcytosine
  modified_base 6: mod_base = OTHER; note = 2'-Omethylcytosine
  modified_base 10: mod_base = OTHER; note = 2'-Omethylguanosine
  modified_base 11: mod_base = OTHER; note = 2'-Omethylcytosine
  modified_base 12: mod_base = OTHER; note = 2'-Omethylguanosine
  modified_base 13: mod_base = OTHER; note = 2'-Omethylcytosine
  modified_base 15: mod_base = OTHER; note = 2'-Omethyladenosine
  modified_base 16: mod_base = OTHER; note = 2'-Omethyluridine
  modified_base 17: mod_base = OTHER; note = 2'-Omethylguanosine
  modified_base 18: mod_base = OTHER; note = 2'-fluoroguanosine phosphorothiorate
  modified_base 20: mod_base = OTHER; note = Uridine phosphorothiorate
  modified_base 21: mod_base = OTHER; note = Adenosine phosphorothiorate
  modified_base 22: mod_base = OTHER; note = 2'-Omethylguanosine
  modified_base 23: mod_base = OTHER; note = 2'-Omethylcytosine
  modified_base 24: mod_base = OTHER; note = 2'-Omethylguanosine
  modified_base 25: mod_base = OTHER; note = 2'-Omethylcytosine
  modified_base 26: mod_base = OTHER; note = Adenosine phosphorothiorate
  modified_base 28: mod_base = OTHER; note = 2'-Omethyluridine phosphorothiorate
  modified_base 29: mod_base = OTHER; note = 2'-Omethylguanosine
  modified_base 30: mod_base = OTHER; note = 2'-Omethylguanosine phosphorothiorate
  modified_base 31: mod_base = OTHER; note = 2'-Omethyladenosine phosphorothiorate
  modified_base 32: mod_base = OTHER; note = 2'-Omethylcytosine phosphorothiorate
  modified_base 33: mod_base = OTHER; note = 2'-fluorouridine
  modified_base 34: mod_base = OTHER; note = 2'-Omethyluridine phosphorothiorate
  modified_base 35: mod_base = OTHER; note = Cytosine phosphorothiorate
  modified_base 36: mod_base = OTHER; note = 2'-Omethyladenosine phosphorothiorate
  modified_base 37: mod_base = OTHER; note = Adenosine phosphorothiorate
  modified_base 38: mod_base = OTHER; note = Adenosine phosphorothiorate
  modified_base 39: mod_base = OTHER; note = 2'-Omethyluridine phosphorothiorate
  modified_base 40: mod_base = OTHER; note = 2'-Omethyluridine
  modified_base 41: mod_base = OTHER; note = 2'-fluorocytosine
  modified_base 42: mod_base = OTHER; note = Adenosine phosphorothiorate
  modified_base 44: mod_base = OTHER; note = 2'-Omethyladenosine
  modified_base 47: mod_base = OTHER; note = 2'-Omethyluridine phosphorothiorate
  modified_base 48: mod_base = OTHER; note = 2'-fluorouridine
  modified_base 50: mod_base = OTHER; note = 2'-Omethylcytosine
  modified_base 51: mod_base = OTHER; note = 2'-Omethylguanosine
  modified_base 52: mod_base = OTHER; note = 2'-Omethylguanosine
  modified_base 53: mod_base = OTHER; note = 2'-Omethylguanosine
  modified_base 54: mod_base = OTHER; note = Uridine phosphorothiorate
  modified_base 55: mod_base = OTHER; note = Uridine phosphorothiorate
  modified_base 56: mod_base = OTHER; note = 2'-Omethylcytosine phosphorothiorate
  modified_base 57: mod_base = OTHER; note = 2'-Omethylguanosine phosphorothiorate
  modified_base 59: mod_base = OTHER; note = 2'-Omethylguanosine
  modified_base 60: mod_base = OTHER; note = 2'-Omethyluridine phosphorothiorate
  modified_base 62: mod_base = OTHER; note = 2'-Omethylcytosine
  modified_base 63: mod_base = OTHER; note = 2'-fluorocytosine
  modified_base 64: mod_base = OTHER; note = 2'-Omethylguanosine
  modified_base 65: mod_base = OTHER; note = 2'-Omethylguanosine phosphorothiorate
  modified_base 66: mod_base = OTHER; note = 2'-fluorocytosine phosphorothiorate
  modified_base 67: mod_base = OTHER; note = 2'-Omethylguanosine phosphorothiorate
  modified_base 68: mod_base = OTHER; note = 2'-Omethylguanosine phosphorothiorate
  modified_base 69: mod_base = OTHER; note = 2'-fluoroadenosine
  modified_base 70: mod_base = OTHER; note = 2'-fluoroguanosine phosphorothiorate
  modified_base 71: mod_base = OTHER; note = 2'-Omethyluridine
  modified_base 72: mod_base = OTHER; note = Cytosine phosphorothiorate
  modified_base 73: mod_base = OTHER; note = 2'-Omethylguanosine
  modified_base 74: mod_base = OTHER; note = 2'-fluorocytosine phosphorothiorate
  modified_base 75: mod_base = OTHER; note = 2'-fluorocytosine phosphorothiorate
  modified_base 76: mod_base = OTHER; note = 2'-fluoroadenosine

SEQ ID NO: 9190 - RNA, 85 nt, synthetic construct; identical to SEQ ID NO: 3317
  source 1..85: mol_type = other RNA
  modified_base 1: mod_base = OTHER; note = 2'-Omethylguanosine phosphorothiorate
  modified_base 2: mod_base = OTHER; note = Cytosine phosphorothiorate
  modified_base 7: mod_base = OTHER; note = Adenosine phosphorothiorate
  modified_base 21: mod_base = OTHER; note = 2'-Omethyladenosine
  modified_base 24: mod_base = OTHER; note = 2'-Omethylguanosine phosphorothiorate
  modified_base 46: mod_base = OTHER; note = 2'-Omethylguanosine
  modified_base 59: mod_base = OTHER; note = 2'-Omethylcytosine phosphorothiorate
  modified_base 82: mod_base = OTHER; note = 2'-Omethylguanosine

SEQ ID NO: 9191 - RNA, 85 nt, synthetic construct; identical to SEQ ID NO: 3286
  source 1..85: mol_type = other RNA
  modified_base 1: mod_base = OTHER; note = 2'-Omethylcytosine
  modified_base 11: mod_base = OTHER; note = Cytosine phosphorothiorate
  modified_base 17: mod_base = OTHER; note = 2'-Omethylguanosine
  modified_base 44: mod_base = OTHER; note = 2'-Omethylguanosine
  modified_base 55: mod_base = OTHER; note = 2'-Omethylcytosine
  modified_base 57: mod_base = OTHER; note = 2'-Omethylcytosine
  modified_base 59: mod_base = OTHER; note = 2'-Omethyluridine
  modified_base 67: mod_base = OTHER; note = Adenosine phosphorothiorate
  modified_base 84: mod_base = OTHER; note = 2'-fluorocytosine phosphorothiorate

SEQ ID NO: 9192 - RNA, 76 nt, synthetic construct; identical to SEQ ID NO: 625
  source 1..76: mol_type = other RNA
  modified_base 1: mod_base = OTHER; note = 2'-Omethylguanosine
  modified_base 3: mod_base = OTHER; note = 2'-fluorocytosine
  modified_base 7: mod_base = OTHER; note = Guanosine phosphorothiorate
  modified_base 14: mod_base = OTHER; note = 2'-fluoroadenosine phosphorothiorate
  modified_base 15: mod_base = OTHER; note = 2'-fluoroadenosine phosphorothiorate
  modified_base 20: mod_base = OTHER; note = 2'-fluorouridine
  modified_base 24: mod_base = OTHER; note = Guanosine phosphorothiorate
  modified_base 25: mod_base = OTHER; note = 2'-fluorocytosine
  modified_base 28: mod_base = OTHER; note = Uridine phosphorothiorate
  modified_base 29: mod_base = OTHER; note = 2'-fluoroguanosine
  modified_base 30: mod_base = OTHER; note = 2'-fluoroguanosine phosphorothiorate
  modified_base 31: mod_base = OTHER; note = 2'-Omethyladenosine
  modified_base 38: mod_base = OTHER; note = 2'-fluoroadenosine
  modified_base 40: mod_base = OTHER; note = 2'-fluorouridine
  modified_base 42: mod_base = OTHER; note = 2'-fluoroadenosine
  modified_base 46: mod_base = OTHER; note = 2'-fluoroguanosine
  modified_base 47: mod_base = OTHER; note = 2'-Omethyluridine phosphorothiorate
  modified_base 48: mod_base = OTHER; note = 2'-Omethyluridine
  modified_base 49: mod_base = OTHER; note = 2'-Omethylcytosine
  modified_base 51: mod_base = OTHER; note = 2'-Omethylguanosine
  modified_base 52: mod_base = OTHER; note = 2'-fluoroguanosine
  modified_base 60: mod_base = OTHER; note = Uridine phosphorothiorate
  modified_base 61: mod_base = OTHER; note = 2'-fluorocytosine phosphorothiorate
  modified_base 62: mod_base = OTHER; note = 2'-fluorocytosine
  modified_base 63: mod_base = OTHER; note = 2'-Omethylcytosine
  modified_base 64: mod_base = OTHER; note = Guanosine phosphorothiorate
  modified_base 65: mod_base = OTHER; note = 2'-fluoroguanosine
  modified_base 68: mod_base = OTHER; note = Guanosine phosphorothiorate
  modified_base 69: mod_base = OTHER; note = Adenosine phosphorothiorate
  modified_base 70: mod_base = OTHER; note = 2'-Omethylguanosine
  modified_base 71: mod_base = OTHER; note = 2'-Omethyluridine phosphorothiorate
  modified_base 72: mod_base = OTHER; note = Cytosine phosphorothiorate
  modified_base 75: mod_base = OTHER; note = 2'-Omethylcytosine
  modified_base 76: mod_base = OTHER; note = 2'-fluoroadenosine

SEQ ID NO: 9193 - RNA, 76 nt, synthetic construct; identical to SEQ ID NO: 625
  source 1..76: mol_type = other RNA
  modified_base 1: mod_base = OTHER; note = 2'-Omethylguanosine phosphorothiorate
  modified_base 2: mod_base = OTHER; note = 2'-Omethylguanosine phosphorothiorate
  modified_base 22: mod_base = OTHER; note = Guanosine phosphorothiorate
  modified_base 23: mod_base = OTHER; note = 2'-Omethylcytosine
  modified_base 66: mod_base = OTHER; note = Cytosine phosphorothiorate
  modified_base 67: mod_base = OTHER; note = 2'-Omethylguanosine
  modified_base 73: mod_base = OTHER; note = 2'-Omethylguanosine phosphorothiorate
  modified_base 74: mod_base = OTHER; note = Cytosine phosphorothiorate
  modified_base 75: mod_base = OTHER; note = 2'-Omethylcytosine
  modified_base 76: mod_base = OTHER; note = 2'-O-(2-Methoxyethyl) adenosine

SEQ ID NO: 9194 - RNA, 76 nt, synthetic construct; identical to SEQ ID NO: 625
  source 1..76: mol_type = other RNA
  modified_base 2: mod_base = OTHER; note = 2'-Omethylguanosine
  modified_base 3: mod_base = OTHER; note = Cytosine phosphorothiorate
  modified_base 4: mod_base = OTHER; note = 2'-fluorouridine
  modified_base 5: mod_base = OTHER; note = 2'-Omethylcytosine
  modified_base 9: mod_base = OTHER; note = Guanosine phosphorothiorate
  modified_base 10: mod_base = OTHER; note = 2'-Omethylguanosine phosphorothiorate
  modified_base 11: mod_base = OTHER; note = 2'-fluorocytosine
  modified_base 12: mod_base = OTHER; note = 2'-Omethylguanosine
  modified_base 16: mod_base = OTHER; note = 2'-Omethyluridine
  modified_base 17: mod_base = OTHER; note = 2'-Omethylguanosine
  modified_base 18: mod_base = OTHER; note = 2'-Omethylguanosine
  modified_base 20: mod_base = OTHER; note = 2'-fluorouridine
  modified_base 23: mod_base = OTHER; note = Cytosine phosphorothiorate
  modified_base 24: mod_base = OTHER; note = 2'-Omethylguanosine
  modified_base 25: mod_base = OTHER; note = 2'-Omethylcytosine
  modified_base 29: mod_base = OTHER; note = 2'-fluoroguanosine
  modified_base 30: mod_base = OTHER; note = 2'-Omethylguanosine
  modified_base 31: mod_base = OTHER; note = 2'-fluoroadenosine
  modified_base 39: mod_base = OTHER; note = 2'-fluorouridine
  modified_base 40: mod_base = OTHER; note = 2'-Omethyluridine
  modified_base 42: mod_base = OTHER; note = 2'-Omethyladenosine
  modified_base 48: mod_base = OTHER; note = 2'-fluorouridine
  modified_base 49: mod_base = OTHER; note = 2'-fluorocytosine
  modified_base 50: mod_base = OTHER; note = 2'-fluorocytosine phosphorothiorate
  modified_base 51: mod_base = OTHER; note = 2'-Omethylguanosine
  modified_base 58: mod_base = OTHER; note = 2'-fluoroadenosine phosphorothiorate
  modified_base 62: mod_base = OTHER; note = Cytosine phosphorothiorate
  modified_base 63: mod_base = OTHER; note = 2'-Omethylcytosine
  modified_base 66: mod_base = OTHER; note = Cytosine phosphorothiorate
  modified_base 68: mod_base = OTHER; note = 2'-Omethylguanosine
  modified_base 69: mod_base = OTHER; note = 2'-fluoroadenosine
  modified_base 71: mod_base = OTHER; note = 2'-Omethyluridine phosphorothiorate
  modified_base 72: mod_base = OTHER; note = 2'-Omethylcytosine
  modified_base 73: mod_base = OTHER; note = 2'-fluoroguanosine

SEQ ID NO: 9195 - RNA, 85 nt, synthetic construct; identical to SEQ ID NO: 3297
  source 1..85: mol_type = other RNA
  modified_base 1: mod_base = OTHER; note = 2'-Omethylguanosine
  modified_base 10: mod_base = OTHER; note = 2'-Omethylguanosine
  modified_base 11: mod_base = OTHER; note = 2'-Omethylcytosine
  modified_base 12: mod_base = OTHER; note = 2'-Omethylcytosine
  modified_base 13: mod_base = OTHER; note = 2'-Omethylguanosine
  modified_base 14: mod_base = OTHER; note = 2'-Omethyladenosine
  modified_base 15: mod_base = OTHER; note = 2'-Omethylguanosine
  modified_base 16: mod_base = OTHER; note = 2'-Omethyluridine
  modified_base 17: mod_base = OTHER; note = 2'-Omethylguanosine
  modified_base 18: mod_base = OTHER; note = 2'-Omethylguanosine
  modified_base 19: mod_base = OTHER; note = Uridine phosphorothiorate
  modified_base 20: mod_base = OTHER; note = 2'-Omethyluridine
  modified_base 21: mod_base = OTHER; note = Adenosine phosphorothiorate
  modified_base 22: mod_base = OTHER; note = 2'-Omethyladenosine
  modified_base 23: mod_base = OTHER; note = 2'-Omethylguanosine
  modified_base 24: mod_base = OTHER; note = 2'-Omethylguanosine
  modified_base 25: mod_base = OTHER; note = 2'-Omethylcytosine
  modified_base 33: mod_base = OTHER; note = 2'-fluorouridine
  modified_base 34: mod_base = OTHER; note = 2'-Omethyluridine
  modified_base 35: mod_base = OTHER; note = Cytosine phosphorothiorate
  modified_base 37: mod_base = OTHER; note = Adenosine phosphorothiorate
  modified_base 38: mod_base = OTHER; note = Adenosine phosphorothiorate
  modified_base 58: mod_base = OTHER; note = 2'-Omethylguanosine
  modified_base 59: mod_base = OTHER; note = 2'-Omethylcytosine
  modified_base 61: mod_base = OTHER; note = 2'-Omethylguanosine
  modified_base 63: mod_base = OTHER; note = Uridine phosphorothiorate
  modified_base 64: mod_base = OTHER; note = Uridine phosphorothiorate
  modified_base 70: mod_base = OTHER; note = 2'-Omethylcytosine
  modified_base 74: mod_base = OTHER; note = 2'-Omethylcytosine
  modified_base 82: mod_base = OTHER; note = 2'-Omethylguanosine

SEQ ID NO: 9196 - RNA, 86 nt, synthetic construct; identical to SEQ ID NO: 3290
  source 1..86: mol_type = other RNA
  modified_base 39: mod_base = OTHER; note = 2'-Omethyluridine
  modified_base 40: mod_base = OTHER; note = 2'-Omethylcytosine
  modified_base 41: mod_base = OTHER; note = 2'-Omethylcytosine
  modified_base 42: mod_base = OTHER; note = 2'-Omethyladenosine
  modified_base 43: mod_base = OTHER; note = 2'-Omethyladenosine

SEQ ID NO: 9197 - RNA, 76 nt, synthetic construct; identical to SEQ ID NO: 625
  source 1..76: mol_type = other RNA
  modified_base 1: mod_base = OTHER; note = 2'-Omethylguanosine phosphorothiorate
  modified_base 2: mod_base = OTHER; note = 2'-Omethylguanosine phosphorothiorate
  modified_base 3: mod_base = OTHER; note = 2'-Omethylcytosine
  modified_base 4: mod_base = OTHER; note = 2'-Omethyluridine
  modified_base 5: mod_base = OTHER; note = 2'-Omethylcytosine
  modified_base 6: mod_base = OTHER; note = 2'-Omethylcytosine
  modified_base 22: mod_base = OTHER; note = 2'-Omethylguanosine
  modified_base 23: mod_base = OTHER; note = 2'-Omethylcytosine
  modified_base 24: mod_base = OTHER; note = 2'-Omethylguanosine
  modified_base 25: mod_base = OTHER; note = 2'-Omethylcytosine
  modified_base 40: mod_base = OTHER; note = 2'-fluorouridine
  modified_base 41: mod_base = OTHER; note = 2'-fluorocytosine
  modified_base 42: mod_base = OTHER; note = 2'-fluoroadenosine
  modified_base 43: mod_base = OTHER; note = 2'-fluoroadenosine
  modified_base 48: mod_base = OTHER; note = 2'-fluorouridine
  modified_base 49: mod_base = OTHER; note = 2'-Omethylcytosine
  modified_base 50: mod_base = OTHER; note = 2'-Omethylcytosine
  modified_base 51: mod_base = OTHER; note = 2'-Omethylguanosine
  modified_base 52: mod_base = OTHER; note = 2'-Omethylguanosine
  modified_base 53: mod_base = OTHER; note = 2'-Omethylguanosine
  modified_base 54: mod_base = OTHER; note = 2'-Omethyluridine
  modified_base 61: mod_base = OTHER; note = 2'-Omethylcytosine
  modified_base 62: mod_base = OTHER; note = 2'-Omethylcytosine
  modified_base 63: mod_base = OTHER; note = 2'-fluorocytosine
  modified_base 64: mod_base = OTHER; note = 2'-Omethylguanosine
  modified_base 65: mod_base = OTHER; note = 2'-Omethylguanosine
  modified_base 66: mod_base = OTHER; note = 2'-Omethylcytosine
  modified_base 67: mod_base = OTHER; note = 2'-Omethylguanosine
  modified_base 68: mod_base = OTHER; note = 2'-Omethylguanosine
  modified_base 73: mod_base = OTHER; note = 2'-Omethylguanosine

SEQ ID NO: 9198 - RNA, 76 nt, synthetic construct; identical to SEQ ID NO: 3289
  source 1..76: mol_type = other RNA
  modified_base 1: mod_base = OTHER; note = 2'-Omethylguanosine
  modified_base 2: mod_base = OTHER; note = 2'-Omethylcytosine
  modified_base 3: mod_base = OTHER; note = 2'-Omethylcytosine
  modified_base 4: mod_base = OTHER; note = 2'-Omethyluridine
  modified_base 5: mod_base = OTHER; note = 2'-Omethylguanosine
  modified_base 6: mod_base = OTHER; note = 2'-Omethylguanosine
  modified_base 66: mod_base = OTHER; note = 2'-Omethyluridine
  modified_base 67: mod_base = OTHER; note = 2'-Omethylcytosine
  modified_base 68: mod_base = OTHER; note = 2'-Omethylcytosine
  modified_base 73: mod_base = OTHER; note = 2'-Omethylguanosine

SEQ ID NO: 9199 - RNA, 76 nt, synthetic construct; identical to SEQ ID NO: 625
  source 1..76: mol_type = other RNA
  modified_base 1: mod_base = OTHER; note = 2'-Omethylguanosine
  modified_base 10: mod_base = OTHER; note = 2'-Omethylguanosine
  modified_base 13: mod_base = OTHER; note = 2'-Omethylcytosine
  modified_base 17: mod_base = OTHER; note = Guanosine phosphorothiorate
  modified_base 18: mod_base = OTHER; note = 2'-Omethylguanosine
  modified_base 19: mod_base = OTHER; note = Adenosine phosphorothiorate
  modified_base 20: mod_base = OTHER; note = 2'-Omethyluridine
  modified_base 25: mod_base = OTHER; note = 2'-Omethylcytosine
  modified_base 29: mod_base = OTHER; note = 2'-Omethylguanosine
  modified_base 33: mod_base = OTHER; note = 2'-fluorouridine
  modified_base 35: mod_base = OTHER; note = Cytosine phosphorothiorate
  modified_base 37: mod_base = OTHER; note = Adenosine phosphorothiorate
  modified_base 38: mod_base = OTHER; note = Adenosine phosphorothiorate
  modified_base 43: mod_base = OTHER; note = 2'-Omethyladenosine
  modified_base 44: mod_base = OTHER; note = 2'-fluoroadenosine
  modified_base 46: mod_base = OTHER; note = Guanosine phosphorothiorate
  modified_base 50: mod_base = OTHER; note = 2'-Omethylcytosine
  modified_base 52: mod_base = OTHER; note = 2'-Omethylguanosine
  modified_base 54: mod_base = OTHER; note = Uridine phosphorothiorate
  modified_base 55: mod_base = OTHER; note = Uridine phosphorothiorate
  modified_base 56: mod_base = OTHER; note = 2'-Omethylcytosine
  modified_base 57: mod_base = OTHER; note = Guanosine phosphorothiorate
  modified_base 62: mod_base = OTHER; note = 2'-Omethylcytosine
  modified_base 63: mod_base = OTHER; note = 2'-fluorocytosine
  modified_base 65: mod_base = OTHER; note = 2'-Omethylguanosine
  modified_base 71: mod_base = OTHER; note = 2'-fluorouridine
  modified_base 73: mod_base = OTHER; note = 2'-Omethylguanosine

SEQ ID NO: 9200 - RNA, 74 nt, synthetic construct; identical to SEQ ID NO: 3293
  source 1..74: mol_type = other RNA
  modified_base 1: mod_base = OTHER; note = 2'-fluoroadenosine phosphorothiorate
  modified_base 14: mod_base = OTHER; note = 2'-Omethyladenosine
  modified_base 24: mod_base = OTHER; note = 2'-fluoroguanosine
  modified_base 28: mod_base = OTHER; note = 2'-fluoroguanosine
  modified_base 43: mod_base = OTHER; note = Guanosine phosphorothiorate
  modified_base 47: mod_base = OTHER; note = 2'-fluoroguanosine
  modified_base 68: mod_base = OTHER; note = Guanosine phosphorothiorate
  modified_base 73: mod_base = OTHER; note = 2'-Omethylcytosine phosphorothiorate

SEQ ID NO: 9201 - RNA, 76 nt, synthetic construct; identical to SEQ ID NO: 625
  source 1..76: mol_type = other RNA
  modified_base 1: mod_base = OTHER; note = 2'-Omethylguanosine phosphorothiorate
  modified_base 2: mod_base = OTHER; note = 2'-fluoroguanosine
  modified_base 4: mod_base = OTHER; note = 2'-Omethyluridine phosphorothiorate
  modified_base 5: mod_base = OTHER; note = 2'-Omethylcytosine
  modified_base 6: mod_base = OTHER; note = Cytosine phosphorothiorate
  modified_base 9: mod_base = OTHER; note = Guanosine phosphorothiorate
  modified_base 10: mod_base = OTHER; note = 2'-Omethylguanosine
  modified_base 11: mod_base = OTHER; note = Cytosine phosphorothiorate
  modified_base 12: mod_base = OTHER; note = 2'-Omethylguanosine phosphorothiorate
  modified_base 14: mod_base = OTHER; note = Adenosine phosphorothiorate
  modified_base 15: mod_base = OTHER; note = 2'-fluoroadenosine
  modified_base 17: mod_base = OTHER; note = 2'-Omethylguanosine phosphorothiorate
  modified_base 18: mod_base = OTHER; note = 2'-Omethylguanosine
  modified_base 22: mod_base = OTHER; note = 2'-Omethylguanosine
  modified_base 24: mod_base = OTHER; note = 2'-fluoroguanosine
  modified_base 26: mod_base = OTHER; note = 2'-fluoroadenosine phosphorothiorate
  modified_base 29: mod_base = OTHER; note = 2'-fluoroguanosine
  modified_base 31: mod_base = OTHER; note = 2'-fluoroadenosine
  modified_base 40: mod_base = OTHER; note = 2'-fluorouridine
  modified_base 41: mod_base = OTHER; note = 2'-fluorocytosine phosphorothiorate
  modified_base 44: mod_base = OTHER; note = 2'-fluoroadenosine
  modified_base 47: mod_base = OTHER; note = 2'-Omethyluridine
  modified_base 50: mod_base = OTHER; note = Cytosine phosphorothiorate
  modified_base 53: mod_base = OTHER; note = 2'-Omethylguanosine
  modified_base 55: mod_base = OTHER; note = Uridine phosphorothiorate
  modified_base 58: mod_base = OTHER; note = Adenosine phosphorothiorate
  modified_base 59: mod_base = OTHER; note = 2'-fluoroguanosine
  modified_base 62: mod_base = OTHER; note = Cytosine phosphorothiorate
  modified_base 63: mod_base = OTHER; note = 2'-Omethylcytosine phosphorothiorate
  modified_base 64: mod_base = OTHER; note = 2'-fluoroguanosine
  modified_base 66: mod_base = OTHER; note = 2'-Omethylcytosine
  modified_base 71: mod_base = OTHER; note = 2'-Omethyluridine
  modified_base 72: mod_base = OTHER; note = 2'-fluorocytosine phosphorothiorate
  modified_base 73: mod_base = OTHER; note = 2'-fluoroguanosine
  modified_base 75: mod_base = OTHER; note = 2'-fluorocytosine
  modified_base 76: mod_base = OTHER; note = 2'-fluoroadenosine

SEQ ID NO: 9202 - RNA, 76 nt, synthetic construct; identical to SEQ ID NO: 3318
  source 1..76: mol_type = other RNA
  modified_base 1: mod_base = OTHER; note = 2'-Omethylcytosine
  modified_base 2: mod_base = OTHER; note = 2'-Omethylcytosine
  modified_base 3: mod_base = OTHER; note = 2'-Omethyluridine
  modified_base 4: mod_base = OTHER; note = 2'-Omethyluridine
  modified_base 5: mod_base = OTHER; note = 2'-Omethylcytosine
  modified_base 6: mod_base = OTHER; note = 2'-Omethylguanosine
  modified_base 10: mod_base = OTHER; note = 2'-Omethylguanosine
  modified_base 13: mod_base = OTHER; note = 2'-Omethylcytosine
  modified_base 18: mod_base = OTHER; note = Guanosine phosphorothiorate
  modified_base 19: mod_base = OTHER; note = 2'-Omethylguanosine
  modified_base 20: mod_base = OTHER; note = Uridine phosphorothiorate
  modified_base 25: mod_base = OTHER; note = 2'-Omethylcytosine
  modified_base 29: mod_base = OTHER; note = 2'-Omethylguanosine
  modified_base 33: mod_base = OTHER; note = 2'-fluorouridine
  modified_base 35: mod_base = OTHER; note = Uridine phosphorothiorate
  modified_base 37: mod_base = OTHER; note = Guanosine phosphorothiorate
  modified_base 38: mod_base = OTHER; note = Adenosine phosphorothiorate
  modified_base 41: mod_base = OTHER; note = 2'-fluorocytosine phosphorothiorate
  modified_base 43: mod_base = OTHER; note = 2'-Omethyluridine
  modified_base 44: mod_base = OTHER; note = 2'-fluoroadenosine
  modified_base 46: mod_base = OTHER; note = Guanosine phosphorothiorate
  modified_base 50: mod_base = OTHER; note = 2'-Omethylcytosine
  modified_base 52: mod_base = OTHER; note = 2'-Omethylguanosine
  modified_base 54: mod_base = OTHER; note = Uridine phosphorothiorate
  modified_base 55: mod_base = OTHER; note = Uridine phosphorothiorate
  modified_base 56: mod_base = OTHER; note = 2'-Omethylcytosine
  modified_base 57: mod_base = OTHER; note = Guanosine phosphorothiorate
  modified_base 62: mod_base = OTHER; note = 2'-Omethylcytosine
  modified_base 63: mod_base = OTHER; note = 2'-fluoroguanosine
  modified_base 65: mod_base = OTHER; note = 2'-Omethylcytosine
  modified_base 71: mod_base = OTHER; note = 2'-Omethylguanosine
  modified_base 73: mod_base = OTHER; note = 2'-Omethyladenosine

SEQ ID NO: 9203 - RNA, 75 nt, synthetic construct; identical to SEQ ID NO: 1045
  source 1..75: mol_type = other RNA
  modified_base 1: mod_base = OTHER; note = 2'-Omethylguanosine phosphorothiorate
  modified_base 2: mod_base = OTHER; note = 2'-Omethylguanosine phosphorothiorate
  modified_base 8: mod_base = OTHER; note = Uridine phosphorothiorate
  modified_base 14: mod_base = OTHER; note = Adenosine phosphorothiorate
  modified_base 18: mod_base = OTHER; note = Guanosine phosphorothiorate
  modified_base 20: mod_base = OTHER; note = 2'-Omethyladenosine phosphorothiorate
  modified_base 22: mod_base = OTHER; note = Guanosine phosphorothiorate
  modified_base 25: mod_base = OTHER; note = Cytosine phosphorothiorate
  modified_base 27: mod_base = OTHER; note = Cytosine phosphorothiorate
  modified_base 41: mod_base = OTHER; note = 2'-Omethylcytosine phosphorothiorate
  modified_base 45: mod_base = OTHER; note = Guanosine phosphorothiorate
  modified_base 46: mod_base = OTHER; note = Adenosine phosphorothiorate
  modified_base 47: mod_base = OTHER; note = 2'-fluorouridine
  modified_base 48: mod_base = OTHER; note = Cytosine phosphorothiorate
  modified_base 70: mod_base = OTHER; note = Cytosine phosphorothiorate
  modified_base 72: mod_base = OTHER; note = 2'-Omethyluridine phosphorothiorate

SEQ ID NO: 9204 - RNA, 85 nt, synthetic construct; identical to SEQ ID NO: 3317
  source 1..85: mol_type = other RNA
  modified_base 1: mod_base = OTHER; note = 2'-Omethylguanosine phosphorothiorate
  modified_base 2: mod_base = OTHER; note = Cytosine phosphorothiorate
  modified_base 17: mod_base = OTHER; note = 2'-Omethylguanosine
  modified_base 53: mod_base = OTHER; note = 2'-Omethylcytosine phosphorothiorate
  modified_base 58: mod_base = OTHER; note = Guanosine phosphorothiorate
  modified_base 60: mod_base = OTHER; note = Adenosine phosphorothiorate
  modified_base 84: mod_base = OTHER; note = 2'-Omethylcytosine phosphorothiorate

SEQ ID NO: 9205 - RNA, 76 nt, synthetic construct; identical to SEQ ID NO: 3289
  source 1..76: mol_type = other RNA
  modified_base 1: mod_base = OTHER; note = 2'-Omethylguanosine phosphorothiorate
  modified_base 2: mod_base = OTHER; note = 2'-Omethylcytosine phosphorothiorate
  modified_base 3: mod_base = OTHER; note = 2'-Omethylcytosine
  modified_base 4: mod_base = OTHER; note = 2'-Omethyluridine
  modified_base 5: mod_base = OTHER; note = 2'-Omethylguanosine
  modified_base 6: mod_base = OTHER; note = 2'-Omethylguanosine
  modified_base 16: mod_base = OTHER; note = 2'-Omethyluridine
  modified_base 18: mod_base = OTHER; note = 2'-Omethylguanosine
  modified_base 19: mod_base = OTHER; note = 2'-Omethylguanosine
  modified_base 22: mod_base = OTHER; note = 2'-Omethylguanosine
  modified_base 24: mod_base = OTHER; note = 2'-Omethylguanosine
  modified_base 25: mod_base = OTHER; note = 2'-Omethylcytosine
  modified_base 33: mod_base = OTHER; note = 2'-fluorouridine
  modified_base 35: mod_base = OTHER; note = Uridine phosphorothiorate
  modified_base 37: mod_base = OTHER; note = Adenosine phosphorothiorate
  modified_base 38: mod_base = OTHER; note = Adenosine phosphorothiorate
  modified_base 44: mod_base = OTHER; note = 2'-Omethylguanosine
  modified_base 45: mod_base = OTHER; note = 2'-Omethylguanosine
  modified_base 46: mod_base = OTHER; note = 2'-fluoroguanosine
  modified_base 47: mod_base = OTHER; note = 2'-fluorouridine
  modified_base 48: mod_base = OTHER; note = 2'-fluorocytosine
  modified_base 49: mod_base = OTHER; note = 2'-Omethylcytosine
  modified_base 50: mod_base = OTHER; note = 2'-Omethyladenosine
  modified_base 51: mod_base = OTHER; note = 2'-Omethylguanosine
  modified_base 52: mod_base = OTHER; note = 2'-Omethylguanosine
  modified_base 53: mod_base = OTHER; note = 2'-Omethylguanosine
  modified_base 54: mod_base = OTHER; note = 2'-Omethyluridine
  modified_base 56: mod_base = OTHER; note = 2'-Omethylcytosine
  modified_base 59: mod_base = OTHER; note = 2'-Omethylguanosine
  modified_base 61: mod_base = OTHER; note = 2'-Omethylcytosine
  modified_base 62: mod_base = OTHER; note = 2'-Omethylcytosine
  modified_base 63: mod_base = OTHER; note = 2'-fluorocytosine
  modified_base 64: mod_base = OTHER; note = 2'-Omethyluridine
  modified_base 65: mod_base = OTHER; note = 2'-Omethylguanosine
  modified_base 66: mod_base = OTHER; note = 2'-Omethyluridine
  modified_base 67: mod_base = OTHER; note = 2'-Omethylcytosine
  modified_base 68: mod_base = OTHER; note = 2'-Omethylcytosine
  modified_base 73: mod_base = OTHER; note = 2'-Omethylguanosine

SEQ ID NO: 9206 - RNA, 76 nt, synthetic construct; identical to SEQ ID NO: 3318
  source 1..76: mol_type = other RNA
  modified_base 1: mod_base = OTHER; note = 2'-Omethylcytosine
  modified_base 2: mod_base = OTHER; note = 2'-Omethylcytosine
  modified_base 3: mod_base = OTHER; note = 2'-Omethyluridine
  modified_base 4: mod_base = OTHER; note = 2'-Omethyluridine
  modified_base 5: mod_base = OTHER; note = 2'-Omethylcytosine
  modified_base 6: mod_base = OTHER; note = 2'-Omethylguanosine
  modified_base 65: mod_base = OTHER; note = 2'-Omethylcytosine
  modified_base 66: mod_base = OTHER; note = 2'-Omethyluridine
  modified_base 67: mod_base = OTHER; note = 2'-Omethylcytosine
  modified_base 68: mod_base = OTHER; note = 2'-Omethylguanosine
  modified_base 73: mod_base = OTHER; note = 2'-Omethyladenosine

SEQ ID NO: 9207 - RNA, 76 nt, synthetic construct; identical to SEQ ID NO: 3795
  source 1..76: mol_type = other RNA
  modified_base 1: mod_base = OTHER; note = 2'-Omethylguanosine
  modified_base 2: mod_base = OTHER; note = 2'-Omethylcytosine
  modified_base 3: mod_base = OTHER; note = 2'-Omethylcytosine
  modified_base 4: mod_base = OTHER; note = 2'-Omethyluridine
  modified_base 5: mod_base = OTHER; note = 2'-Omethylcytosine
  modified_base 6: mod_base = OTHER; note = 2'-Omethylcytosine
  modified_base 16: mod_base = OTHER; note = 2'-Omethyluridine
  modified_base 17: mod_base = OTHER; note = 2'-Omethylguanosine
  modified_base 18: mod_base = OTHER; note = 2'-Omethylguanosine
  modified_base 33: mod_base = OTHER; note = 2'-fluorouridine
  modified_base 35: mod_base = OTHER; note = Cytosine phosphorothiorate
  modified_base 37: mod_base = OTHER; note = Adenosine phosphorothiorate
  modified_base 38: mod_base = OTHER; note = Adenosine phosphorothiorate
  modified_base 44: mod_base = OTHER; note = 2'-Omethylguanosine
  modified_base 45: mod_base = OTHER; note = 2'-Omethylguanosine
  modified_base 46: mod_base = OTHER; note = 2'-fluoroadenosine
  modified_base 47: mod_base = OTHER; note = 2'-fluorouridine
  modified_base 48: mod_base = OTHER; note = 2'-fluorouridine
  modified_base 56: mod_base = OTHER; note = 2'-Omethylcytosine
  modified_base 59: mod_base = OTHER; note = 2'-Omethylguanosine
  modified_base 61: mod_base = OTHER; note = 2'-Omethylcytosine
  modified_base 62: mod_base = OTHER; note = 2'-Omethylcytosine
  modified_base 63: mod_base = OTHER; note = 2'-fluorocytosine
  modified_base 64: mod_base = OTHER; note = 2'-Omethylguanosine
  modified_base 65: mod_base = OTHER; note = 2'-Omethyluridine
  modified_base 66: mod_base = OTHER; note = 2'-Omethylcytosine
  modified_base 67: mod_base = OTHER; note = 2'-Omethylguanosine
  modified_base 68: mod_base = OTHER; note = 2'-Omethylguanosine
  modified_base 73: mod_base = OTHER; note = 2'-Omethylguanosine

SEQ ID NO: 9208 - RNA, 75 nt, synthetic construct; identical to SEQ ID NO: 3306
  source 1..75: mol_type = other RNA
  modified_base 48: mod_base = OTHER; note = 2'-Omethylguanosine
  modified_base 49: mod_base = OTHER; note = 2'-Omethylcytosine
  modified_base 50: mod_base = OTHER; note = 2'-Omethylguanosine
  modified_base 51: mod_base = OTHER; note = 2'-Omethyluridine
  modified_base 52: mod_base = OTHER; note = 2'-Omethylguanosine
  modified_base 60: mod_base = OTHER; note = 2'-Omethylcytosine
  modified_base 61: mod_base = OTHER; note = 2'-Omethyladenosine
  modified_base 62: mod_base = OTHER; note = 2'-Omethylcytosine
  modified_base 63: mod_base = OTHER; note = 2'-Omethylguanosine
  modified_base 64: mod_base = OTHER; note = 2'-Omethyluridine

SEQ ID NO: 9209 - RNA, 76 nt, synthetic construct; identical to SEQ ID NO: 625
  source 1..76: mol_type = other RNA
  modified_base 1: mod_base = OTHER; note = 2'-Omethylguanosine phosphorothiorate
  modified_base 2: mod_base = OTHER; note = 2'-Omethylguanosine
  modified_base 33: mod_base = OTHER; note = 2'-fluorouridine
  modified_base 35: mod_base = OTHER; note = Cytosine phosphorothiorate
  modified_base 37: mod_base = OTHER; note = Adenosine phosphorothiorate
  modified_base 38: mod_base = OTHER; note = Adenosine phosphorothiorate
  modified_base 52: mod_base = OTHER; note = 2'-Omethylguanosine
  modified_base 73: mod_base = OTHER; note = 2'-Omethylguanosine
  modified_base 75: mod_base = OTHER; note = 2'-fluorocytosine phosphorothiorate

SEQ ID NO: 9210 - RNA, 73 nt, synthetic construct; identical to SEQ ID NO: 935
  source 1..73: mol_type = other RNA
  modified_base 1: mod_base = OTHER; note = 2'-Omethylguanosine phosphorothiorate
  modified_base 2: mod_base = OTHER; note = 2'-Omethylguanosine
  modified_base 3: mod_base = OTHER; note = 2'-Omethylcytosine
  modified_base 4: mod_base = OTHER; note = 2'-Omethyluridine
  modified_base 5: mod_base = OTHER; note = 2'-Omethylcytosine
  modified_base 6: mod_base = OTHER; note = 2'-Omethylcytosine
  modified_base 43: mod_base = OTHER; note = 2'-Omethyladenosine
  modified_base 44: mod_base = OTHER; note = 2'-Omethyladenosine
  modified_base 45: mod_base = OTHER; note = 2'-Omethylguanosine
  modified_base 46: mod_base = OTHER; note = 2'-fluoroguanosine
  modified_base 48: mod_base = OTHER; note = 2'-fluorouridine
  modified_base 49: mod_base = OTHER; note = 2'-Omethylcytosine
  modified_base 72: mod_base = OTHER; note = 2'-Omethylcytosine

SEQ ID NO: 9211 - RNA, 75 nt, synthetic construct; identical to SEQ ID NO: 3299
  source 1..75: mol_type = other RNA
  modified_base 6: mod_base = OTHER; note = 2'-Omethylguanosine phosphorothiorate
  modified_base 15: mod_base = OTHER; note = 2'-fluorouridine
  modified_base 16: mod_base = OTHER; note = 2'-fluorocytosine
  modified_base 23: mod_base = OTHER; note = 2'-fluoroguanosine
  modified_base 40: mod_base = OTHER; note = 2'-fluorouridine phosphorothiorate
  modified_base 47: mod_base = OTHER; note = Cytosine phosphorothiorate
  modified_base 49: mod_base = OTHER; note = 2'-fluoroadenosine
  modified_base 73: mod_base = OTHER; note = Cytosine phosphorothiorate
  modified_base 74: mod_base = OTHER; note = Cytosine phosphorothiorate

SEQ ID NO: 9212 - RNA, 75 nt, synthetic construct; identical to SEQ ID NO: 1045
  source 1..75: mol_type = other RNA
  modified_base 1: mod_base = OTHER; note = 2'-Omethylguanosine phosphorothiorate
  modified_base 2: mod_base = OTHER; note = 2'-Omethylguanosine phosphorothiorate
  modified_base 24: mod_base = OTHER; note = 2'-Omethyladenosine
  modified_base 38: mod_base = OTHER; note = Adenosine phosphorothiorate
  modified_base 44: mod_base = OTHER; note = 2'-fluorocytosine phosphorothiorate
  modified_base 45: mod_base = OTHER; note = 2'-fluoroguanosine
  modified_base 55: mod_base = OTHER; note = Cytosine phosphorothiorate
  modified_base 56: mod_base = OTHER; note = 2'-Omethylguanosine
  modified_base 60: mod_base = OTHER; note = 2'-fluorocytosine
  modified_base 73: mod_base = OTHER; note = Cytosine phosphorothiorate
  modified_base 74: mod_base = OTHER; note = 2'-Omethylcytosine

SEQ ID NO: 9213 - RNA, 85 nt, synthetic construct; identical to SEQ ID NO: 3310
  source 1..85: mol_type = other RNA
  modified_base 1: mod_base = OTHER; note = 2'-Omethylcytosine phosphorothiorate
  modified_base 3: mod_base = OTHER; note = 2'-Omethyladenosine
  modified_base 14: mod_base = OTHER; note = Guanosine phosphorothiorate
  modified_base 34: mod_base = OTHER; note = Uridine phosphorothiorate
  modified_base 36: mod_base = OTHER; note = 2'-fluoroguanosine
  modified_base 49: mod_base = OTHER; note = Uridine phosphorothiorate
  modified_base 54: mod_base = OTHER; note = 2'-fluorocytosine
  modified_base 58: mod_base = OTHER; note = 2'-fluoroguanosine
  modified_base 62: mod_base = OTHER; note = Guanosine phosphorothiorate
  modified_base 84: mod_base = OTHER; note = 2'-fluorocytosine

SEQ ID NO: 9214 - RNA, 76 nt, synthetic construct; identical to SEQ ID NO: 625
  source 1..76: mol_type = other RNA
  modified_base 1: mod_base = OTHER; note = 2'-Omethylguanosine
  modified_base 3: mod_base = OTHER; note = 2'-fluorocytosine
  modified_base 4: mod_base = OTHER; note = 2'-Omethyluridine
  modified_base 6: mod_base = OTHER; note = 2'-fluorocytosine
  modified_base 12: mod_base = OTHER; note = 2'-Omethylguanosine phosphorothiorate
  modified_base 13: mod_base = OTHER; note = Cytosine phosphorothiorate
  modified_base 14: mod_base = OTHER; note = 2'-fluoroadenosine
  modified_base 18: mod_base = OTHER; note = Guanosine phosphorothiorate
  modified_base 19: mod_base = OTHER; note = Adenosine phosphorothiorate
  modified_base 20: mod_base = OTHER; note = 2'-Omethyluridine
  modified_base 22: mod_base = OTHER; note = 2'-Omethylguanosine
  modified_base 23: mod_base = OTHER; note = Cytosine phosphorothiorate
  modified_base 24: mod_base = OTHER; note = 2'-Omethylguanosine
  modified_base 26: mod_base = OTHER; note = 2'-fluoroadenosine
  modified_base 31: mod_base = OTHER; note = 2'-Omethyladenosine
  modified_base 36: mod_base = OTHER; note = Adenosine phosphorothiorate
  modified_base 37: mod_base = OTHER; note = Adenosine phosphorothiorate
  modified_base 38: mod_base = OTHER; note = 2'-Omethyladenosine
  modified_base 39: mod_base = OTHER; note = 2'-fluorouridine
  modified_base 40: mod_base = OTHER; note = 2'-Omethyluridine
  modified_base 41: mod_base = OTHER; note = 2'-Omethylcytosine
  modified_base 42: mod_base = OTHER; note = 2'-fluoroadenosine phosphorothiorate
  modified_base 43: mod_base = OTHER; note = 2'-Omethyladenosine
  modified_base 45: mod_base = OTHER; note = 2'-fluoroguanosine
  modified_base 47: mod_base = OTHER; note = 2'-fluorouridine
  modified_base 48: mod_base = OTHER; note = Uridine phosphorothiorate
  modified_base 49: mod_base = OTHER; note = 2'-Omethylcytosine
  modified_base 52: mod_base = OTHER; note = 2'-fluoroguanosine
  modified_base 54: mod_base = OTHER; note = Uridine phosphorothiorate
  modified_base 56: mod_base = OTHER; note = Cytosine phosphorothiorate
  modified_base 60: mod_base = OTHER; note = 2'-fluorouridine
  modified_base 64: mod_base = OTHER; note = 2'-fluoroguanosine
  modified_base 66: mod_base = OTHER; note = 2'-fluorocytosine
  modified_base 67: mod_base = OTHER; note = 2'-fluoroguanosine phosphorothiorate
  modified_base 68: mod_base = OTHER; note = 2'-fluoroguanosine
  modified_base 69: mod_base = OTHER; note = 2'-fluoroadenosine
  modified_base 70: mod_base = OTHER; note = Guanosine phosphorothiorate
  modified_base 72: mod_base = OTHER; note = 2'-fluorocytosine
  modified_base 75: mod_base = OTHER; note = 2'-Omethylcytosine

SEQ ID NO: 9215 - RNA, 76 nt, synthetic construct; identical to SEQ ID NO: 625
  source 1..76: mol_type = other RNA
  modified_base 1: mod_base = OTHER; note = 2'-Omethylguanosine phosphorothiorate
  modified_base 2: mod_base = OTHER; note = 2'-Omethylguanosine
  modified_base 3: mod_base = OTHER; note = 2'-Omethylcytosine
  modified_base 4: mod_base = OTHER; note = 2'-Omethyluridine
  modified_base 5: mod_base = OTHER; note = 2'-Omethylcytosine
  modified_base 6: mod_base = OTHER; note = 2'-Omethylcytosine
  modified_base 16: mod_base = OTHER; note = 2'-Omethyluridine
  modified_base 17: mod_base = OTHER; note = 2'-Omethylguanosine
  modified_base 18: mod_base = OTHER; note = 2'-Omethylguanosine
  modified_base 22: mod_base = OTHER; note = 2'-Omethylguanosine
  modified_base 23: mod_base = OTHER; note = 2'-Omethylcytosine
  modified_base 24: mod_base = OTHER; note = 2'-Omethylguanosine
  modified_base 25: mod_base = OTHER; note = 2'-Omethylcytosine
  modified_base 40: mod_base = OTHER; note = 2'-fluorouridine
  modified_base 41: mod_base = OTHER; note = 2'-fluorocytosine
  modified_base 42: mod_base = OTHER; note = 2'-fluoroadenosine
  modified_base 43: mod_base = OTHER; note = 2'-fluoroadenosine
  modified_base 54: mod_base = OTHER; note = 2'-Omethyluridine phosphorothiorate
  modified_base 55: mod_base = OTHER; note = Uridine phosphorothiorate
  modified_base 56: mod_base = OTHER; note = 2'-Omethylcytosine
  modified_base 57: mod_base = OTHER; note = 2'-fluoroguanosine
  modified_base 59: mod_base = OTHER; note = 2'-Omethylguanosine
  modified_base 73: mod_base = OTHER; note = 2'-Omethylguanosine

SEQ ID NO: 9216 - RNA, 76 nt, synthetic construct; identical to SEQ ID NO: 3318
  source 1..76: mol_type = other RNA
  modified_base 50: mod_base = OTHER; note = 2'-Omethylcytosine
  modified_base 52: mod_base = OTHER; note = 2'-Omethylguanosine

SEQ ID NO: 9217 - RNA, 76 nt, synthetic construct; identical to SEQ ID NO: 3332
  source 1..76: mol_type = other RNA
  modified_base 1: mod_base = OTHER; note = 2'-Omethylguanosine
  modified_base 13: mod_base = OTHER; note = 2'-Omethylcytosine
  modified_base 17: mod_base = OTHER; note = 2'-Omethylguanosine
  modified_base 18: mod_base = OTHER; note = 2'-Omethylguanosine
  modified_base 25: mod_base = OTHER; note = 2'-Omethylcytosine
  modified_base 33: mod_base = OTHER; note = Uridine phosphorothiorate
  modified_base 34: mod_base = OTHER; note = 2'-Omethyluridine
  modified_base 35: mod_base = OTHER; note = Cytosine phosphorothiorate
  modified_base 37: mod_base = OTHER; note = Adenosine phosphorothiorate
  modified_base 38: mod_base = OTHER; note = Adenosine phosphorothiorate
  modified_base 41: mod_base = OTHER; note = 2'-fluorocytosine
  modified_base 42: mod_base = OTHER; note = 2'-Omethyladenosine
  modified_base 43: mod_base = OTHER; note = 2'-Omethyladenosine
  modified_base 44: mod_base = OTHER; note = 2'-fluoroadenosine
  modified_base 49: mod_base = OTHER; note = 2'-Omethylguanosine
  modified_base 50: mod_base = OTHER; note = 2'-Omethylcytosine
  modified_base 52: mod_base = OTHER; note = 2'-Omethylguanosine
  modified_base 54: mod_base = OTHER; note = Uridine phosphorothiorate
  modified_base 55: mod_base = OTHER; note = Uridine phosphorothiorate
  modified_base 56: mod_base = OTHER; note = 2'-Omethylcytosine
  modified_base 57: mod_base = OTHER; note = Guanosine phosphorothiorate
  modified_base 58: mod_base = OTHER; note = Adenosine phosphorothiorate
  modified_base 59: mod_base = OTHER; note = 2'-Omethylguanosine
  modified_base 61: mod_base = OTHER; note = 2'-Omethylcytosine
  modified_base 65: mod_base = OTHER; note = 2'-Omethylcytosine
  modified_base 73: mod_base = OTHER; note = 2'-Omethylguanosine

SEQ ID NO: 9218 - RNA, 85 nt, synthetic construct; identical to SEQ ID NO: 3288
  source 1..85: mol_type = other RNA
  modified_base 1: mod_base = OTHER; note = 2'-Omethylcytosine
  modified_base 11: mod_base = OTHER; note = Cytosine phosphorothiorate
  modified_base 26: mod_base = OTHER; note = 2'-fluorouridine
  modified_base 30: mod_base = OTHER; note = 2'-fluoroadenosine
  modified_base 34: mod_base = OTHER; note = 2'-fluorocytosine
  modified_base 43: mod_base = OTHER; note = 2'-Omethyluridine
  modified_base 54: mod_base = OTHER; note = 2'-fluorocytosine
  modified_base 61: mod_base = OTHER; note = 2'-Omethylguanosine
  modified_base 71: mod_base = OTHER; note = 2'-fluorocytosine
  modified_base 73: mod_base = OTHER; note = Adenosine phosphorothiorate
  modified_base 84: mod_base = OTHER; note = Cytosine phosphorothiorate

SEQ ID NO: 9219 - RNA, 76 nt, synthetic construct; identical to SEQ ID NO: 3289
  source 1..76: mol_type = other RNA
  modified_base 1: mod_base = OTHER; note = 2'-Omethylguanosine
  modified_base 2: mod_base = OTHER; note = 2'-Omethylcytosine
  modified_base 3: mod_base = OTHER; note = 2'-Omethylcytosine
  modified_base 4: mod_base = OTHER; note = 2'-Omethyluridine
  modified_base 5: mod_base = OTHER; note = 2'-Omethylguanosine
  modified_base 6: mod_base = OTHER; note = 2'-Omethylguanosine
  modified_base 61: mod_base = OTHER; note = 2'-Omethylcytosine
  modified_base 62: mod_base = OTHER; note = 2'-Omethylcytosine
  modified_base 63: mod_base = OTHER; note = 2'-fluorocytosine
  modified_base 64: mod_base = OTHER; note = 2'-Omethyluridine
  modified_base 65: mod_base = OTHER; note = 2'-Omethylguanosine
  modified_base 66: mod_base = OTHER; note = 2'-Omethyluridine
  modified_base 67: mod_base = OTHER; note = 2'-Omethylcytosine
  modified_base 68: mod_base = OTHER; note = 2'-Omethylcytosine
  modified_base 73: mod_base = OTHER; note = 2'-Omethylguanosine

SEQ ID NO: 9220 - RNA, 76 nt, synthetic construct; identical to SEQ ID NO: 625
  source 1..76: mol_type = other RNA
  modified_base 1: mod_base = OTHER; note = 2'-Omethylguanosine phosphorothiorate
  modified_base 2: mod_base = OTHER; note = 2'-Omethylguanosine phosphorothiorate
  modified_base 3: mod_base = OTHER; note = 2'-Omethylcytosine
  modified_base 4: mod_base = OTHER; note = 2'-Omethyluridine
  modified_base 5: mod_base = OTHER; note = 2'-Omethylcytosine
  modified_base 6: mod_base = OTHER; note = 2'-Omethylcytosine
  modified_base 10: mod_base = OTHER; note = 2'-Omethylguanosine
  modified_base 11: mod_base = OTHER; note = 2'-Omethylcytosine
  modified_base 12: mod_base = OTHER; note = 2'-Omethylguanosine
  modified_base 13: mod_base = OTHER; note = 2'-Omethylcytosine
  modified_base 14: mod_base = OTHER; note = 2'-Omethyladenosine
  modified_base 15: mod_base = OTHER; note = 2'-fluoroadenosine
  modified_base 16: mod_base = OTHER; note = 2'-Omethyluridine
  modified_base 17: mod_base = OTHER; note = 2'-Omethylguanosine
  modified_base 18: mod_base = OTHER; note = 2'-Omethylguanosine
  modified_base 19: mod_base = OTHER; note = 2'-fluoroadenosine
  modified_base 20: mod_base = OTHER; note = 2'-Omethyluridine
  modified_base 21: mod_base = OTHER; note = 2'-fluoroadenosine
  modified_base 22: mod_base = OTHER; note = 2'-Omethylguanosine
  modified_base 23: mod_base = OTHER; note = 2'-Omethylcytosine
  modified_base 24: mod_base = OTHER; note = 2'-Omethylguanosine
  modified_base 25: mod_base = OTHER; note = 2'-Omethylcytosine
  modified_base 38: mod_base = OTHER; note = Adenosine phosphorothiorate
  modified_base 39: mod_base = OTHER; note = Uridine phosphorothiorate
  modified_base 40: mod_base = OTHER; note = 2'-fluorouridine
  modified_base 43: mod_base = OTHER; note = 2'-Omethyladenosine
  modified_base 44: mod_base = OTHER; note = 2'-Omethyladenosine
  modified_base 45: mod_base = OTHER; note = 2'-Omethylguanosine
  modified_base 46: mod_base = OTHER; note = 2'-fluoroguanosine
  modified_base 48: mod_base = OTHER; note = 2'-fluorouridine
  modified_base 49: mod_base = OTHER; note = 2'-Omethylcytosine
  modified_base 50: mod_base = OTHER; note = 2'-Omethylcytosine
  modified_base 51: mod_base = OTHER; note = 2'-Omethylguanosine
  modified_base 52: mod_base = OTHER; note = 2'-Omethylguanosine
  modified_base 53: mod_base = OTHER; note = 2'-Omethylguanosine
  modified_base 54: mod_base = OTHER; note = 2'-Omethyluridine
  modified_base 61: mod_base = OTHER; note = 2'-Omethylcytosine
  modified_base 62: mod_base = OTHER; note = 2'-Omethylcytosine
  modified_base 63: mod_base = OTHER; note = 2'-fluorocytosine
  modified_base 64: mod_base = OTHER; note = 2'-Omethylguanosine
  modified_base 65: mod_base = OTHER; note = 2'-Omethylguanosine
  modified_base 66: mod_base = OTHER; note = 2'-Omethylcytosine
  modified_base 67: mod_base = OTHER; note = 2'-Omethylguanosine
  modified_base 68: mod_base = OTHER; note = 2'-Omethylguanosine
  modified_base 69: mod_base = OTHER; note = 2'-fluoroadenosine
  modified_base 70: mod_base = OTHER; note = 2'-fluoroguanosine

SEQ ID NO: 9221 - RNA, 76 nt, synthetic construct
  source 1..76: mol_type = other RNA
ggctccgtggcgcaatggatagcgcattggacttcaaattcaaagggctgtggttcgagtccacacggagtcgcca

SEQ ID NO: 9222 - RNA, 76 nt, synthetic construct; identical to SEQ ID NO: 625
  source 1..76: mol_type = other RNA
  modified_base 1: mod_base = OTHER; note = 2'-Omethylguanosine phosphorothiorate
  modified_base 2: mod_base = OTHER; note = 2'-Omethylguanosine
  modified_base 3: mod_base = OTHER; note = 2'-Omethylcytosine
  modified_base 4: mod_base = OTHER; note = 2'-Omethyluridine
  modified_base 5: mod_base = OTHER; note = 2'-Omethylcytosine
  modified_base 6: mod_base = OTHER; note = 2'-Omethylcytosine
  modified_base 16: mod_base = OTHER; note = 2'-Omethyluridine
  modified_base 17: mod_base = OTHER; note = 2'-Omethylguanosine
  modified_base 18: mod_base = OTHER; note = 2'-Omethylguanosine
  modified_base 22: mod_base = OTHER; note = 2'-Omethylguanosine
  modified_base 23: mod_base = OTHER; note = 2'-Omethylcytosine
  modified_base 24: mod_base = OTHER; note = 2'-Omethylguanosine
  modified_base 25: mod_base = OTHER; note = 2'-Omethylcytosine
  modified_base 40: mod_base = OTHER; note = 2'-fluorouridine
  modified_base 41: mod_base = OTHER; note = 2'-fluorocytosine
  modified_base 42: mod_base = OTHER; note = 2'-fluoroadenosine
  modified_base 43: mod_base = OTHER; note = 2'-fluoroadenosine
  modified_base 54: mod_base = OTHER; note = 2'-Omethyluridine phosphorothiorate
  modified_base 56: mod_base = OTHER; note = 2'-Omethylcytosine
  modified_base 57: mod_base = OTHER; note = 2'-fluoroguanosine
  modified_base 59: mod_base = OTHER; note = 2'-Omethylguanosine
  modified_base 73: mod_base = OTHER; note = 2'-Omethylguanosine

SEQ ID NO: 9223 - RNA, 85 nt, synthetic construct; identical to SEQ ID NO: 3301
  source 1..85: mol_type = other RNA
  modified_base 1: mod_base = OTHER; note = 2'-Omethylguanosine phosphorothiorate
  modified_base 3: mod_base = OTHER; note = Uridine phosphorothiorate
  modified_base 4: mod_base = OTHER; note = 2'-Omethylguanosine phosphorothiorate
  modified_base 11: mod_base = OTHER; note = 2'-Omethylcytosine
  modified_base 18: mod_base = OTHER; note = 2'-Omethylguanosine phosphorothiorate
  modified_base 21: mod_base = OTHER; note = 2'-Omethyladenosine phosphorothiorate
  modified_base 27: mod_base = OTHER; note = Uridine phosphorothiorate
  modified_base 37: mod_base = OTHER; note = 2'-Omethyladenosine phosphorothiorate
  modified_base 44: mod_base = OTHER; note = 2'-Omethyluridine
  modified_base 46: mod_base = OTHER; note = 2'-Omethylguanosine phosphorothiorate
  modified_base 47: mod_base = OTHER; note = 2'-Omethylguanosine
  modified_base 50: mod_base = OTHER; note = Cytosine phosphorothiorate
  modified_base 54: mod_base = OTHER; note = 2'-Omethylcytosine
  modified_base 55: mod_base = OTHER; note = 2'-Omethylcytosine phosphorothiorate
  modified_base 59: mod_base = OTHER; note = 2'-Omethylcytosine
  modified_base 63: mod_base = OTHER; note = 2'-Omethyluridine
  modified_base 82: mod_base = OTHER; note = Guanosine phosphorothiorate
  modified_base 83: mod_base = OTHER; note = Cytosine phosphorothiorate
  modified_base 84: mod_base = OTHER; note = 2'-fluorocytosine

SEQ ID NO: 9224 - RNA, 76 nt, synthetic construct; identical to SEQ ID NO: 625
  source 1..76: mol_type = other RNA
  modified_base 1: mod_base = OTHER; note = 2'-Omethylguanosine
  modified_base 17: mod_base = OTHER; note = 2'-Omethylguanosine
  modified_base 18: mod_base = OTHER; note = 2'-Omethylguanosine
  modified_base 47: mod_base = OTHER; note = Thymine
  modified_base 50: mod_base = OTHER; note = 2'-Omethylcytosine
  modified_base 52: mod_base = OTHER; note = 2'-Omethylguanosine
  modified_base 73: mod_base = OTHER; note = 2'-Omethylguanosine

SEQ ID NO: 9225 - RNA, 76 nt, synthetic construct; identical to SEQ ID NO: 625
  source 1..76: mol_type = other RNA
  modified_base 1: mod_base = OTHER; note = 2'-Omethylguanosine phosphorothiorate
  modified_base 2: mod_base = OTHER; note = 2'-Omethylguanosine
  modified_base 3: mod_base = OTHER; note = 2'-Omethylcytosine
  modified_base 4: mod_base = OTHER; note = 2'-Omethyluridine
  modified_base 5: mod_base = OTHER; note = 2'-Omethylcytosine
  modified_base 6: mod_base = OTHER; note = 2'-Omethylcytosine
  modified_base 10: mod_base = OTHER; note = 2'-Omethylguanosine
  modified_base 11: mod_base = OTHER; note = 2'-Omethylcytosine
  modified_base 12: mod_base = OTHER; note = 2'-Omethylguanosine
  modified_base 13: mod_base = OTHER; note = 2'-Omethylcytosine
  modified_base 14: mod_base = OTHER; note = 2'-Omethyladenosine
  modified_base 15: mod_base = OTHER; note = 2'-fluoroadenosine
  modified_base 16: mod_base = OTHER; note = 2'-Omethyluridine
  modified_base 17: mod_base = OTHER; note = 2'-Omethylguanosine
  modified_base 18: mod_base = OTHER; note = 2'-Omethylguanosine
  modified_base 19: mod_base = OTHER; note = 2'-fluoroadenosine
  modified_base 20: mod_base = OTHER; note = 2'-Omethyluridine
  modified_base 49: mod_base = OTHER; note = 2'-Omethylcytosine
  modified_base 50: mod_base = OTHER; note = 2'-Omethylcytosine
  modified_base 51: mod_base = OTHER; note = 2'-Omethylguanosine
  modified_base 52: mod_base = OTHER; note = 2'-Omethylguanosine
  modified_base 53: mod_base = OTHER; note = 2'-Omethylguanosine
  modified_base 54: mod_base = OTHER; note = 2'-Omethyluridine
  modified_base 56: mod_base = OTHER; note = 2'-Omethylcytosine
  modified_base 57: mod_base = OTHER; note = 2'-fluoroguanosine
  modified_base 59: mod_base = OTHER; note = 2'-Omethylguanosine
  modified_base 61: mod_base = OTHER; note = 2'-Omethylcytosine
  modified_base 62: mod_base = OTHER; note = 2'-Omethylcytosine
  modified_base 63: mod_base = OTHER; note = 2'-Omethylcytosine
  modified_base 64: mod_base = OTHER; note = 2'-Omethylguanosine
  modified_base 65: mod_base = OTHER; note = 2'-Omethylguanosine
  modified_base 66: mod_base = OTHER; note = 2'-Omethylcytosine
  modified_base 67: mod_base = OTHER; note = 2'-Omethylguanosine
  modified_base 68: mod_base = OTHER; note = 2'-Omethylguanosine
  modified_base 69: mod_base = OTHER; note = 2'-Omethyladenosine
  modified_base 73: mod_base = OTHER; note = 2'-Omethylguanosine

SEQ ID NO: 9226 - RNA, 86 nt, synthetic construct; identical to SEQ ID NO: 3290
  source 1..86: mol_type = other RNA
  modified_base 35: mod_base = OTHER; note = 2'-fluorocytosine

SEQ ID NO: 9227 - RNA, 75 nt, synthetic construct; identical to SEQ ID NO: 3311
  source 1..75: mol_type = other RNA
  modified_base 1: mod_base = OTHER; note = 2'-fluoroguanosine
  modified_base 3: mod_base = OTHER; note = Uridine phosphorothiorate
  modified_base 6: mod_base = OTHER; note = Cytosine phosphorothiorate
  modified_base 9: mod_base = OTHER; note = Guanosine phosphorothiorate
  modified_base 14: mod_base = OTHER; note = 2'-fluoroadenosine
  modified_base 17: mod_base = OTHER; note = 2'-fluoroguanosine phosphorothiorate
  modified_base 21: mod_base = OTHER; note = Adenosine phosphorothiorate
  modified_base 22: mod_base = OTHER; note = 2'-fluoroguanosine
  modified_base 36: mod_base = OTHER; note = 2'-fluoroadenosine phosphorothiorate
  modified_base 39: mod_base = OTHER; note = 2'-fluorouridine
  modified_base 43: mod_base = OTHER; note = 2'-fluoroguanosine
  modified_base 51: mod_base = OTHER; note = Adenosine phosphorothiorate
  modified_base 57: mod_base = OTHER; note = 2'-fluoroadenosine
  modified_base 61: mod_base = OTHER; note = 2'-fluorouridine phosphorothiorate
  modified_base 65: mod_base = OTHER; note = Uridine phosphorothiorate
  modified_base 67: mod_base = OTHER; note = Guanosine phosphorothiorate
  modified_base 68: mod_base = OTHER; note = 2'-fluoroadenosine
  modified_base 73: mod_base = OTHER; note = Cytosine phosphorothiorate

SEQ ID NO: 9228 - RNA, 76 nt, synthetic construct; identical to SEQ ID NO: 625
  source 1..76: mol_type = other RNA
  modified_base 4: mod_base = OTHER; note = 2'-fluorouridine
  modified_base 6: mod_base = OTHER; note = 2'-Omethylcytosine
  modified_base 8: mod_base = OTHER; note = Uridine phosphorothiorate
  modified_base 10: mod_base = OTHER; note = Guanosine phosphorothiorate
  modified_base 11: mod_base = OTHER; note = 2'-Omethylcytosine
  modified_base 13: mod_base = OTHER; note = 2'-Omethylcytosine
  modified_base 16: mod_base = OTHER; note = Uridine phosphorothiorate
  modified_base 18: mod_base = OTHER; note = 2'-Omethylguanosine
  modified_base 20: mod_base = OTHER; note = 2'-fluorouridine
  modified_base 21: mod_base = OTHER; note = Adenosine phosphorothiorate
  modified_base 22: mod_base = OTHER; note = Guanosine phosphorothiorate
  modified_base 24: mod_base = OTHER; note = 2'-Omethylguanosine
  modified_base 26: mod_base = OTHER; note = Adenosine phosphorothiorate
  modified_base 27: mod_base = OTHER; note = 2'-Omethyluridine
  modified_base 33: mod_base = OTHER; note = Uridine phosphorothiorate
  modified_base 34: mod_base = OTHER; note = 2'-Omethyluridine
  modified_base 37: mod_base = OTHER; note = Adenosine phosphorothiorate
  modified_base 38: mod_base = OTHER; note = 2'-fluoroadenosine
  modified_base 40: mod_base = OTHER; note = 2'-Omethyluridine
  modified_base 41: mod_base = OTHER; note = Cytosine phosphorothiorate
  modified_base 42: mod_base = OTHER; note = 2'-Omethyladenosine
  modified_base 43: mod_base = OTHER; note = Adenosine phosphorothiorate
  modified_base 44: mod_base = OTHER; note = 2'-fluoroadenosine
  modified_base 46: mod_base = OTHER; note = 2'-fluoroguanosine
  modified_base 47: mod_base = OTHER; note = Uridine phosphorothiorate
  modified_base 48: mod_base = OTHER; note = 2'-fluorouridine
  modified_base 49: mod_base = OTHER; note = 2'-Omethylcytosine
  modified_base 52: mod_base = OTHER; note = 2'-fluoroguanosine
  modified_base 53: mod_base = OTHER; note = Guanosine phosphorothiorate
  modified_base 54: mod_base = OTHER; note = 2'-fluorouridine phosphorothiorate
  modified_base 55: mod_base = OTHER; note = Uridine phosphorothiorate
  modified_base 56: mod_base = OTHER; note = 2'-Omethylcytosine
  modified_base 58: mod_base = OTHER; note = Adenosine phosphorothiorate
  modified_base 59: mod_base = OTHER; note = 2'-fluoroguanosine
  modified_base 60: mod_base = OTHER; note = 2'-fluorouridine
  modified_base 61: mod_base = OTHER; note = 2'-Omethylcytosine
  modified_base 63: mod_base = OTHER; note = 2'-Omethylcytosine
  modified_base 65: mod_base = OTHER; note = 2'-fluoroguanosine
  modified_base 66: mod_base = OTHER; note = 2'-Omethylcytosine
  modified_base 70: mod_base = OTHER; note = Guanosine phosphorothiorate
  modified_base 73: mod_base = OTHER; note = Guanosine phosphorothiorate
  modified_base 74: mod_base = OTHER; note = 2'-Omethylcytosine phosphorothiorate

SEQ ID NO: 9229 - RNA, 76 nt, synthetic construct; identical to SEQ ID NO: 3318
  source 1..76: mol_type = other RNA
  modified_base 1: mod_base = OTHER; note = 2'-Omethylcytosine
  modified_base 2: mod_base = OTHER; note = 2'-Omethylcytosine
  modified_base 3: mod_base = OTHER; note = 2'-Omethyluridine
  modified_base 4: mod_base = OTHER; note = 2'-Omethyluridine
  modified_base 5: mod_base = OTHER; note = 2'-Omethylcytosine
  modified_base 6: mod_base = OTHER; note = 2'-Omethylguanosine
  modified_base 14: mod_base = OTHER; note = 2'-Omethyladenosine
  modified_base 15: mod_base = OTHER; note = 2'-Omethylguanosine
  modified_base 16: mod_base = OTHER; note = 2'-Omethyluridine
  modified_base 18: mod_base = OTHER; note = 2'-Omethylguanosine
  modified_base 19: mod_base = OTHER; note = 2'-Omethylguanosine
  modified_base 25: mod_base = OTHER; note = 2'-Omethylcytosine
  modified_base 41: mod_base = OTHER; note = 2'-fluorocytosine
  modified_base 42: mod_base = OTHER; note = 2'-Omethyluridine
  modified_base 43: mod_base = OTHER; note = 2'-Omethyluridine
  modified_base 44: mod_base = OTHER; note = 2'-fluoroadenosine
  modified_base 49: mod_base = OTHER; note = 2'-Omethylguanosine
  modified_base 50: mod_base = OTHER; note = 2'-Omethylcytosine
  modified_base 52: mod_base = OTHER; note = 2'-Omethylguanosine
  modified_base 54: mod_base = OTHER; note = 2'-Omethyluridine
  modified_base 55: mod_base = OTHER; note = Uridine phosphorothiorate
  modified_base 56: mod_base = OTHER; note = 2'-Omethylcytosine
  modified_base 57: mod_base = OTHER; note = 2'-fluoroguanosine
  modified_base 59: mod_base = OTHER; note = 2'-Omethyladenosine
  modified_base 61: mod_base = OTHER; note = 2'-Omethylcytosine
  modified_base 65: mod_base = OTHER; note = 2'-Omethylcytosine
  modified_base 73: mod_base = OTHER; note = 2'-Omethyladenosine

SEQ ID NO: 9230 - RNA, 76 nt, synthetic construct; identical to SEQ ID NO: 3289
  source 1..76: mol_type = other RNA
  modified_base 1: mod_base = OTHER; note = 2'-Omethylguanosine phosphorothiorate
  modified_base 2: mod_base = OTHER; note = 2'-Omethylcytosine
  modified_base 3: mod_base = OTHER; note = 2'-Omethylcytosine
  modified_base 4: mod_base = OTHER; note = 2'-Omethyluridine
  modified_base 5: mod_base = OTHER; note = 2'-Omethylguanosine
  modified_base 6: mod_base = OTHER; note = 2'-Omethylguanosine
  modified_base 43: mod_base = OTHER; note = 2'-Omethyladenosine
  modified_base 44: mod_base = OTHER; note = 2'-Omethylguanosine
  modified_base 45: mod_base = OTHER; note = 2'-Omethylguanosine
  modified_base 46: mod_base = OTHER; note = 2'-fluoroguanosine
  modified_base 47: mod_base = OTHER; note = 2'-fluorouridine
  modified_base 48: mod_base = OTHER; note = 2'-Omethylcytosine
  modified_base 49: mod_base = OTHER; note = 2'-Omethylcytosine
  modified_base 73: mod_base = OTHER; note = 2'-Omethylguanosine

SEQ ID NO: 9231 - RNA, 76 nt, synthetic construct; identical to SEQ ID NO: 3447
  source 1..76: mol_type = other RNA
  modified_base 1: mod_base = OTHER; note = 2'-Omethylguanosine
  modified_base 2: mod_base = OTHER; note = 2'-Omethylcytosine
  modified_base 3: mod_base = OTHER; note = 2'-Omethylcytosine
  modified_base 4: mod_base = OTHER; note = 2'-Omethylcytosine
  modified_base 5: mod_base = OTHER; note = 2'-Omethylguanosine
  modified_base 6: mod_base = OTHER; note = 2'-Omethyladenosine
  modified_base 14: mod_base = OTHER; note = 2'-Omethyladenosine
  modified_base 15: mod_base = OTHER; note = 2'-Omethyladenosine
  modified_base 16: mod_base = OTHER; note = 2'-Omethyluridine
  modified_base 17: mod_base = OTHER; note = 2'-Omethylguanosine
  modified_base 18: mod_base = OTHER; note = 2'-Omethylguanosine
  modified_base 20: mod_base = OTHER; note = 2'-Omethyluridine
  modified_base 25: mod_base = OTHER; note = 2'-Omethylcytosine
  modified_base 33: mod_base = OTHER; note = 2'-fluorouridine
  modified_base 35: mod_base = OTHER; note = Cytosine phosphorothiorate
  modified_base 37: mod_base = OTHER; note = Adenosine phosphorothiorate
  modified_base 38: mod_base = OTHER; note = Adenosine phosphorothiorate
  modified_base 41: mod_base = OTHER; note = 2'-fluorocytosine
  modified_base 42: mod_base = OTHER; note = 2'-Omethyladenosine
  modified_base 43: mod_base = OTHER; note = 2'-Omethyladenosine
  modified_base 44: mod_base = OTHER; note = 2'-fluoroadenosine
  modified_base 49: mod_base = OTHER; note = 2'-Omethylcytosine
  modified_base 50: mod_base = OTHER; note = 2'-Omethylcytosine
  modified_base 52: mod_base = OTHER; note = 2'-Omethylguanosine
  modified_base 54: mod_base = OTHER; note = 2'-Omethyluridine
  modified_base 55: mod_base = OTHER; note = Uridine phosphorothiorate
  modified_base 56: mod_base = OTHER; note = 2'-Omethylcytosine
  modified_base 57: mod_base = OTHER; note = 2'-fluoroguanosine
  modified_base 59: mod_base = OTHER; note = 2'-Omethylguanosine
  modified_base 61: mod_base = OTHER; note = 2'-Omethylcytosine
  modified_base 62: mod_base = OTHER; note = 2'-Omethylcytosine
  modified_base 63: mod_base = OTHER; note = 2'-fluorocytosine
  modified_base 64: mod_base = OTHER; note = 2'-Omethylguanosine
  modified_base 65: mod_base = OTHER; note = 2'-Omethylguanosine
  modified_base 73: mod_base = OTHER; note = 2'-Omethylguanosine

SEQ ID NO: 9232 - RNA, 85 nt, synthetic construct; identical to SEQ ID NO: 3297
  source 1..85: mol_type = other RNA
  modified_base 1: mod_base = OTHER; note = 2'-Omethylguanosine phosphorothiorate
  modified_base 2: mod_base = OTHER; note = 2'-Omethylcytosine
  modified_base 3: mod_base = OTHER; note = 2'-Omethyluridine
  modified_base 4: mod_base = OTHER; note = 2'-Omethylguanosine
  modified_base 5: mod_base = OTHER; note = 2'-Omethyluridine
  modified_base 6: mod_base = OTHER; note = 2'-Omethylguanosine
  modified_base 43: mod_base = OTHER; note = 2'-Omethyladenosine
  modified_base 44: mod_base = OTHER; note = 2'-Omethyluridine
  modified_base 56: mod_base = OTHER; note = 2'-fluoroguanosine
  modified_base 57: mod_base = OTHER; note = 2'-Omethylcytosine
  modified_base 58: mod_base = OTHER; note = 2'-Omethylguanosine
  modified_base 82: mod_base = OTHER; note = 2'-Omethylguanosine

SEQ ID NO: 9233 - RNA, 85 nt, synthetic construct; identical to SEQ ID NO: 3288
  source 1..85: mol_type = other RNA
  modified_base 1: mod_base = OTHER; note = 2'-Omethylcytosine
  modified_base 6: mod_base = OTHER; note = 2'-fluoroadenosine
  modified_base 27: mod_base = OTHER; note = 2'-fluorouridine
  modified_base 30: mod_base = OTHER; note = 2'-fluoroadenosine phosphorothiorate
  modified_base 34: mod_base = OTHER; note = Cytosine phosphorothiorate
  modified_base 42: mod_base = OTHER; note = 2'-Omethyladenosine
  modified_base 50: mod_base = OTHER; note = 2'-Omethyladenosine
  modified_base 59: mod_base = OTHER; note = Uridine phosphorothiorate
  modified_base 62: mod_base = OTHER; note = 2'-fluoroguanosine phosphorothiorate
  modified_base 69: mod_base = OTHER; note = 2'-fluorocytosine phosphorothiorate
  modified_base 75: mod_base = OTHER; note = 2'-fluorouridine
  modified_base 81: mod_base = OTHER; note = 2'-fluorouridine
  modified_base 83: mod_base = OTHER; note = Cytosine phosphorothiorate
  modified_base 84: mod_base = OTHER; note = 2'-fluorocytosine

SEQ ID NO: 9234 - RNA, 75 nt, synthetic construct; identical to SEQ ID NO: 3336
  source 1..75: mol_type = other RNA
  modified_base 6: mod_base = OTHER; note = 2'-fluoroguanosine phosphorothiorate
  modified_base 9: mod_base = OTHER; note = Guanosine phosphorothiorate
  modified_base 11: mod_base = OTHER; note = 2'-fluorouridine phosphorothiorate
  modified_base 16: mod_base = OTHER; note = 2'-fluorocytosine
  modified_base 21: mod_base = OTHER; note = 2'-fluoroguanosine
  modified_base 23: mod_base = OTHER; note = 2'-fluoroguanosine
  modified_base 25: mod_base = OTHER; note = 2'-fluoroadenosine
  modified_base 38: mod_base = OTHER; note = Uridine phosphorothiorate
  modified_base 40: mod_base = OTHER; note = 2'-fluorouridine
  modified_base 48: mod_base = OTHER; note = 2'-fluorocytosine
  modified_base 54: mod_base = OTHER; note = 2'-fluorouridine
  modified_base 57: mod_base = OTHER; note = 2'-fluoroadenosine
  modified_base 62: mod_base = OTHER; note = 2'-Omethylcytosine phosphorothiorate
  modified_base 64: mod_base = OTHER; note = 2'-fluoroguanosine
  modified_base 71: mod_base = OTHER; note = Cytosine phosphorothiorate
  modified_base 73: mod_base = OTHER; note = 2'-fluorocytosine phosphorothiorate
  modified_base 74: mod_base = OTHER; note = Cytosine phosphorothiorate

SEQ ID NO: 9235 - RNA, 85 nt, synthetic construct; identical to SEQ ID NO: 3310
  source 1..85: mol_type = other RNA
  modified_base 1: mod_base = OTHER; note = 2'-Omethylcytosine
  modified_base 29: mod_base = OTHER; note = 2'-fluoroguanosine
  modified_base 33: mod_base = OTHER; note = Cytosine phosphorothiorate
  modified_base 34: mod_base = OTHER; note = 2'-fluorouridine
  modified_base 38: mod_base = OTHER; note = 2'-Omethyluridine
  modified_base 46: mod_base = OTHER; note = 2'-Omethyladenosine
  modified_base 54: mod_base = OTHER; note = 2'-fluorocytosine
  modified_base 64: mod_base = OTHER; note = Uridine phosphorothiorate

SEQ ID NO: 9236 - RNA, 86 nt, synthetic construct; identical to SEQ ID NO: 3290
  source 1..86: mol_type = other RNA
  modified_base 84: mod_base = OTHER; note = 2'-Omethylcytosine

SEQ ID NO: 9237 - RNA, 76 nt, synthetic construct; identical to SEQ ID NO: 625
  source 1..76: mol_type = other RNA
  modified_base 1: mod_base = OTHER; note = Guanosine phosphorothiorate
  modified_base 3: mod_base = OTHER; note = 2'-Omethylcytosine
  modified_base 6: mod_base = OTHER; note = 2'-Omethylcytosine phosphorothiorate
  modified_base 10: mod_base = OTHER; note = 2'-Omethylguanosine
  modified_base 11: mod_base = OTHER; note = 2'-Omethylcytosine
  modified_base 13: mod_base = OTHER; note = 2'-fluorocytosine
  modified_base 18: mod_base = OTHER; note = 2'-fluoroguanosine
  modified_base 23: mod_base = OTHER; note = 2'-fluorocytosine
  modified_base 25: mod_base = OTHER; note = Cytosine phosphorothiorate
  modified_base 26: mod_base = OTHER; note = 2'-fluoroadenosine
  modified_base 30: mod_base = OTHER; note = 2'-Omethylguanosine
  modified_base 32: mod_base = OTHER; note = 2'-fluorocytosine
  modified_base 33: mod_base = OTHER; note = Uridine phosphorothiorate
  modified_base 41: mod_base = OTHER; note = 2'-fluorocytosine
  modified_base 44: mod_base = OTHER; note = 2'-Omethyladenosine
  modified_base 45: mod_base = OTHER; note = 2'-fluoroguanosine
  modified_base 46: mod_base = OTHER; note = 2'-fluoroguanosine
  modified_base 48: mod_base = OTHER; note = 2'-Omethyluridine phosphorothiorate
  modified_base 49: mod_base = OTHER; note = 2'-Omethylcytosine
  modified_base 50: mod_base = OTHER; note = 2'-fluorocytosine
  modified_base 52: mod_base = OTHER; note = 2'-Omethylguanosine
  modified_base 53: mod_base = OTHER; note = Guanosine phosphorothiorate
  modified_base 59: mod_base = OTHER; note = Guanosine phosphorothiorate
  modified_base 60: mod_base = OTHER; note = 2'-fluorouridine phosphorothiorate
  modified_base 62: mod_base = OTHER; note = 2'-fluorocytosine
  modified_base 64: mod_base = OTHER; note = Guanosine phosphorothiorate
  modified_base 65: mod_base = OTHER; note = 2'-fluoroguanosine
  modified_base 66: mod_base = OTHER; note = Cytosine phosphorothiorate
  modified_base 67: mod_base = OTHER; note = 2'-fluoroguanosine
  modified_base 70: mod_base = OTHER; note = Guanosine phosphorothiorate
  modified_base 71: mod_base = OTHER; note = 2'-fluorouridine phosphorothiorate
  modified_base 72: mod_base = OTHER; note = Cytosine phosphorothiorate
  modified_base 73: mod_base = OTHER; note = 2'-Omethylguanosine
  modified_base 74: mod_base = OTHER; note = 2'-Omethylcytosine

SEQ ID NO: 9238 - RNA, 85 nt, synthetic construct; identical to SEQ ID NO: 3297
  source 1..85: mol_type = other RNA
  modified_base 1: mod_base = OTHER; note = 2'-Omethylguanosine
  modified_base 17: mod_base = OTHER; note = 2'-Omethylguanosine
  modified_base 18: mod_base = OTHER; note = 2'-Omethylguanosine
  modified_base 59: mod_base = OTHER; note = 2'-Omethylcytosine
  modified_base 61: mod_base = OTHER; note = 2'-Omethylguanosine
  modified_base 82: mod_base = OTHER; note = 2'-Omethylguanosine

SEQ ID NO: 9239 - RNA, 76 nt, synthetic construct; identical to SEQ ID NO: 625
  source 1..76: mol_type = other RNA
  modified_base 1: mod_base = OTHER; note = 2'-Omethylguanosine phosphorothiorate
  modified_base 2: mod_base = OTHER; note = 2'-Omethylguanosine phosphorothiorate
  modified_base 3: mod_base = OTHER; note = 2'-Omethylcytosine
  modified_base 4: mod_base = OTHER; note = 2'-Omethyluridine
  modified_base 5: mod_base = OTHER; note = 2'-Omethylcytosine
  modified_base 6: mod_base = OTHER; note = 2'-Omethylcytosine
  modified_base 16: mod_base = OTHER; note = 2'-Omethyluridine
  modified_base 17: mod_base = OTHER; note = 2'-Omethylguanosine
  modified_base 18: mod_base = OTHER; note = 2'-Omethylguanosine
  modified_base 20: mod_base = OTHER; note = 2'-Omethyluridine
  modified_base 22: mod_base = OTHER; note = 2'-Omethylguanosine
  modified_base 23: mod_base = OTHER; note = 2'-Omethylcytosine
  modified_base 24: mod_base = OTHER; note = 2'-Omethylguanosine
  modified_base 25: mod_base = OTHER; note = 2'-Omethylcytosine
  modified_base 33: mod_base = OTHER; note = 2'-fluorouridine
  modified_base 35: mod_base = OTHER; note = Cytosine phosphorothiorate
  modified_base 37: mod_base = OTHER; note = Adenosine phosphorothiorate
  modified_base 38: mod_base = OTHER; note = Adenosine phosphorothiorate
  modified_base 41: mod_base = OTHER; note = 2'-Omethylcytosine
  modified_base 42: mod_base = OTHER; note = 2'-Omethyladenosine
  modified_base 43: mod_base = OTHER; note = 2'-Omethyladenosine
  modified_base 44: mod_base = OTHER; note = 2'-Omethyladenosine
  modified_base 49: mod_base = OTHER; note = 2'-Omethylcytosine
  modified_base 50: mod_base = OTHER; note = 2'-Omethylcytosine
  modified_base 52: mod_base = OTHER; note = 2'-Omethylguanosine
  modified_base 54: mod_base = OTHER; note = 2'-Omethyluridine
  modified_base 55: mod_base = OTHER; note = Uridine phosphorothiorate
  modified_base 56: mod_base = OTHER; note = 2'-Omethylcytosine
  modified_base 57: mod_base = OTHER; note = 2'-fluoroguanosine
  modified_base 59: mod_base = OTHER; note = 2'-Omethylguanosine
  modified_base 61: mod_base = OTHER; note = 2'-Omethylcytosine
  modified_base 62: mod_base = OTHER; note = 2'-Omethylcytosine
  modified_base 63: mod_base = OTHER; note = 2'-fluorocytosine
  modified_base 64: mod_base = OTHER; note = 2'-Omethylguanosine
  modified_base 65: mod_base = OTHER; note = 2'-Omethylguanosine
  modified_base 75: mod_base = OTHER; note = Cytosine phosphorothiorate
  modified_base 76: mod_base = OTHER; note = 2'-Omethyladenosine

SEQ ID NO: 9240 - RNA, 76 nt, synthetic construct; identical to SEQ ID NO: 3289
  source 1..76: mol_type = other RNA
  modified_base 1: mod_base = OTHER; note = 2'-Omethylguanosine phosphorothiorate
  modified_base 2: mod_base = OTHER; note = 2'-Omethylcytosine phosphorothiorate
  modified_base 3: mod_base = OTHER; note = 2'-Omethylcytosine
  modified_base 4: mod_base = OTHER; note = 2'-Omethyluridine
  modified_base 5: mod_base = OTHER; note = 2'-Omethylguanosine
  modified_base 6: mod_base = OTHER; note = 2'-Omethylguanosine
  modified_base 16: mod_base = OTHER; note = 2'-Omethyluridine
  modified_base 18: mod_base = OTHER; note = 2'-Omethylguanosine
  modified_base 19: mod_base = OTHER; note = 2'-Omethylguanosine
  modified_base 25: mod_base = OTHER; note = 2'-Omethylcytosine
  modified_base 33: mod_base = OTHER; note = 2'-fluorouridine
  modified_base 35: mod_base = OTHER; note = Uridine phosphorothiorate
  modified_base 37: mod_base = OTHER; note = Adenosine phosphorothiorate
  modified_base 38: mod_base = OTHER; note = Adenosine phosphorothiorate
  modified_base 41: mod_base = OTHER; note = 2'-Omethyluridine
  modified_base 44: mod_base = OTHER; note = 2'-Omethylguanosine
  modified_base 45: mod_base = OTHER; note = 2'-Omethylguanosine
  modified_base 46: mod_base = OTHER; note = 2'-fluoroguanosine
  modified_base 47: mod_base = OTHER; note = 2'-fluorouridine
  modified_base 48: mod_base = OTHER; note = 2'-fluorocytosine
  modified_base 49: mod_base = OTHER; note = 2'-Omethylcytosine
  modified_base 50: mod_base = OTHER; note = 2'-Omethyladenosine
  modified_base 51: mod_base = OTHER; note = 2'-Omethylguanosine
  modified_base 52: mod_base = OTHER; note = 2'-Omethylguanosine
  modified_base 53: mod_base = OTHER; note = 2'-Omethylguanosine
  modified_base 54: mod_base = OTHER; note = 2'-Omethyluridine
  modified_base 56: mod_base = OTHER; note = 2'-Omethylcytosine
  modified_base 59: mod_base = OTHER; note = 2'-Omethylguanosine
  modified_base 73: mod_base = OTHER; note = 2'-Omethylguanosine

SEQ ID NO: 9241 - RNA, 75 nt, synthetic construct; identical to SEQ ID NO: 3336
  source 1..75: mol_type = other RNA
  modified_base 6: mod_base = OTHER; note = 2'-Omethylguanosine phosphorothiorate
  modified_base 15: mod_base = OTHER; note = 2'-fluorouridine
  modified_base 16: mod_base = OTHER; note = 2'-fluorocytosine
  modified_base 23: mod_base = OTHER; note = 2'-fluoroguanosine
  modified_base 40: mod_base = OTHER; note = 2'-fluorouridine phosphorothiorate
  modified_base 47: mod_base = OTHER; note = Cytosine phosphorothiorate
  modified_base 49: mod_base = OTHER; note = 2'-fluoroadenosine
  modified_base 73: mod_base = OTHER; note = Cytosine phosphorothiorate
  modified_base 74: mod_base = OTHER; note = Cytosine phosphorothiorate

SEQ ID NO: 9242 - RNA, 85 nt, synthetic construct; identical to SEQ ID NO: 3301
  source 1..85: mol_type = other RNA
  modified_base 1: mod_base = OTHER; note = 2'-Omethylguanosine phosphorothiorate
  modified_base 2: mod_base = OTHER; note = 2'-Omethylcytosine
  modified_base 3: mod_base = OTHER; note = 2'-Omethyluridine phosphorothiorate
  modified_base 4: mod_base = OTHER; note = 2'-fluoroguanosine phosphorothiorate
  modified_base 7: mod_base = OTHER; note = 2'-fluoroadenosine
  modified_base 12: mod_base = OTHER; note = Cytosine phosphorothiorate
  modified_base 17: mod_base = OTHER; note = 2'-Omethylguanosine
  modified_base 22: mod_base = OTHER; note = 2'-Omethyladenosine phosphorothiorate
  modified_base 30: mod_base = OTHER; note = 2'-fluoroguanosine
  modified_base 35: mod_base = OTHER; note = 2'-fluorouridine
  modified_base 36: mod_base = OTHER; note = 2'-fluoroadenosine
  modified_base 41: mod_base = OTHER; note = 2'-fluorocytosine
  modified_base 46: mod_base = OTHER; note = 2'-Omethylguanosine phosphorothiorate
  modified_base 50: mod_base = OTHER; note = 2'-Omethylcytosine phosphorothiorate
  modified_base 52: mod_base = OTHER; note = Cytosine phosphorothiorate
  modified_base 59: mod_base = OTHER; note = 2'-Omethylcytosine
  modified_base 61: mod_base = OTHER; note = 2'-Omethylguanosine
  modified_base 72: mod_base = OTHER; note = 2'-fluorouridine
  modified_base 83: mod_base = OTHER; note = Cytosine phosphorothiorate

SEQ ID NO: 9243 - RNA, 85 nt, synthetic construct; identical to SEQ ID NO: 3317
  source 1..85: mol_type = other RNA
  modified_base 1: mod_base = OTHER; note = 2'-Omethylguanosine phosphorothiorate
  modified_base 2: mod_base = OTHER; note = 2'-Omethylcytosine
  modified_base 5: mod_base = OTHER; note = 2'-fluorouridine phosphorothiorate
  modified_base 18: mod_base = OTHER; note = 2'-fluoroguanosine
  modified_base 19: mod_base = OTHER; note = Uridine phosphorothiorate
  modified_base 43: mod_base = OTHER; note = 2'-Omethyladenosine phosphorothiorate
  modified_base 51: mod_base = OTHER; note = 2'-Omethyluridine
  modified_base 82: mod_base = OTHER; note = 2'-Omethylguanosine
  modified_base 84: mod_base = OTHER; note = 2'-fluorocytosine phosphorothiorate

SEQ ID NO: 9244 - RNA, 75 nt, synthetic construct; identical to SEQ ID NO: 1045
  source 1..75: mol_type = other RNA
  modified_base 1: mod_base = OTHER; note = 2'-Omethylguanosine
  modified_base 10: mod_base = OTHER; note = 2'-Omethylguanosine
  modified_base 11: mod_base = OTHER; note = 2'-Omethyluridine
  modified_base 12: mod_base = OTHER; note = 2'-Omethylguanosine
  modified_base 13: mod_base = OTHER; note = 2'-Omethyluridine
  modified_base 14: mod_base = OTHER; note = 2'-Omethyladenosine
  modified_base 15: mod_base = OTHER; note = 2'-Omethyladenosine
  modified_base 16: mod_base = OTHER; note = 2'-Omethyluridine
  modified_base 17: mod_base = OTHER; note = 2'-Omethylguanosine
  modified_base 18: mod_base = OTHER; note = 2'-Omethylguanosine
  modified_base 19: mod_base = OTHER; note = Uridine phosphorothiorate
  modified_base 20: mod_base = OTHER; note = 2'-Omethyladenosine
  modified_base 21: mod_base = OTHER; note = Adenosine phosphorothiorate
  modified_base 22: mod_base = OTHER; note = 2'-Omethylguanosine
  modified_base 23: mod_base = OTHER; note = 2'-Omethylcytosine
  modified_base 24: mod_base = OTHER; note = 2'-Omethyladenosine
  modified_base 25: mod_base = OTHER; note = 2'-Omethylcytosine
  modified_base 33: mod_base = OTHER; note = Uridine phosphorothiorate
  modified_base 34: mod_base = OTHER; note = 2'-Omethyluridine
  modified_base 35: mod_base = OTHER; note = Uridine phosphorothiorate
  modified_base 37: mod_base = OTHER; note = Adenosine phosphorothiorate
  modified_base 38: mod_base = OTHER; note = Adenosine phosphorothiorate
  modified_base 48: mod_base = OTHER; note = 2'-Omethylcytosine
  modified_base 49: mod_base = OTHER; note = 2'-Omethylcytosine
  modified_base 51: mod_base = OTHER; note = 2'-Omethyladenosine
  modified_base 53: mod_base = OTHER; note = Uridine phosphorothiorate
  modified_base 54: mod_base = OTHER; note = Uridine phosphorothiorate
  modified_base 60: mod_base = OTHER; note = 2'-Omethylcytosine
  modified_base 64: mod_base = OTHER; note = 2'-Omethylguanosine
  modified_base 72: mod_base = OTHER; note = 2'-Omethyluridine

SEQ ID NO: 9245 - RNA, 75 nt, synthetic construct; identical to SEQ ID NO: 1045
  source 1..75: mol_type = other RNA
  modified_base 1: mod_base = OTHER; note = 2'-Omethylguanosine phosphorothiorate
  modified_base 2: mod_base = OTHER; note = 2'-Omethylguanosine phosphorothiorate
  modified_base 12: mod_base = OTHER; note = Guanosine phosphorothiorate
  modified_base 19: mod_base = OTHER; note = 2'-Omethyluridine phosphorothiorate
  modified_base 51: mod_base = OTHER; note = 2'-fluoroadenosine
  modified_base 58: mod_base = OTHER; note = Guanosine phosphorothiorate
  modified_base 59: mod_base = OTHER; note = 2'-fluorouridine
  modified_base 69: mod_base = OTHER; note = 2'-fluoroadenosine

SEQ ID NO: 9246 - RNA, 75 nt, synthetic construct; identical to SEQ ID NO: 3306
  source 1..75: mol_type = other RNA
  modified_base 1: mod_base = OTHER; note = 2'-Omethylguanosine
  modified_base 2: mod_base = OTHER; note = 2'-Omethyladenosine
  modified_base 3: mod_base = OTHER; note = 2'-Omethylcytosine
  modified_base 4: mod_base = OTHER; note = 2'-Omethylcytosine
  modified_base 5: mod_base = OTHER; note = 2'-Omethyluridine
  modified_base 6: mod_base = OTHER; note = 2'-Omethylcytosine
  modified_base 10: mod_base = OTHER; note = 2'-Omethylguanosine
  modified_base 13: mod_base = OTHER; note = 2'-Omethylcytosine
  modified_base 17: mod_base = OTHER; note = Guanosine phosphorothiorate
  modified_base 18: mod_base = OTHER; note = 2'-Omethylguanosine
  modified_base 19: mod_base = OTHER; note = Uridine phosphorothiorate
  modified_base 24: mod_base = OTHER; note = 2'-Omethylcytosine
  modified_base 28: mod_base = OTHER; note = 2'-Omethyluridine
  modified_base 32: mod_base = OTHER; note = 2'-fluorouridine
  modified_base 34: mod_base = OTHER; note = Uridine phosphorothiorate
  modified_base 36: mod_base = OTHER; note = Guanosine phosphorothiorate
  modified_base 37: mod_base = OTHER; note = Adenosine phosphorothiorate
  modified_base 40: mod_base = OTHER; note = 2'-fluoroadenosine phosphorothiorate
  modified_base 42: mod_base = OTHER; note = 2'-Omethyladenosine
  modified_base 43: mod_base = OTHER; note = 2'-fluoroadenosine
  modified_base 45: mod_base = OTHER; note = Guanosine phosphorothiorate
  modified_base 49: mod_base = OTHER; note = 2'-Omethylcytosine
  modified_base 51: mod_base = OTHER; note = 2'-Omethyluridine
  modified_base 53: mod_base = OTHER; note = Uridine phosphorothiorate
  modified_base 54: mod_base = OTHER; note = Uridine phosphorothiorate
  modified_base 55: mod_base = OTHER; note = 2'-Omethylcytosine
  modified_base 56: mod_base = OTHER; note = Adenosine phosphorothiorate
  modified_base 61: mod_base = OTHER; note = 2'-Omethyladenosine
  modified_base 62: mod_base = OTHER; note = 2'-fluorocytosine
  modified_base 64: mod_base = OTHER; note = 2'-Omethyluridine
  modified_base 70: mod_base = OTHER; note = 2'-Omethyluridine
  modified_base 72: mod_base = OTHER; note = 2'-Omethyladenosine

SEQ ID NO: 9247 - RNA, 76 nt, synthetic construct; identical to SEQ ID NO: 625
  source 1..76: mol_type = other RNA
  modified_base 1: mod_base = OTHER; note = 2'-Omethylguanosine phosphorothiorate
  modified_base 2: mod_base = OTHER; note = 2'-Omethylguanosine phosphorothiorate
  modified_base 3: mod_base = OTHER; note = 2'-Omethylcytosine phosphorothiorate
  modified_base 4: mod_base = OTHER; note = 2'-Omethyluridine phosphorothiorate
  modified_base 5: mod_base = OTHER; note = 2'-Omethylcytosine phosphorothiorate
  modified_base 6: mod_base = OTHER; note = 2'-Omethylcytosine phosphorothiorate
  modified_base 10: mod_base = OTHER; note = 2'-Omethylguanosine
  modified_base 11: mod_base = OTHER; note = 2'-Omethylcytosine
  modified_base 12: mod_base = OTHER; note = 2'-Omethylguanosine
  modified_base 13: mod_base = OTHER; note = 2'-Omethylcytosine
  modified_base 22: mod_base = OTHER; note = 2'-Omethylguanosine
  modified_base 23: mod_base = OTHER; note = 2'-Omethylcytosine
  modified_base 24: mod_base = OTHER; note = 2'-Omethylguanosine
  modified_base 25: mod_base = OTHER; note = 2'-Omethylcytosine
  modified_base 49: mod_base = OTHER; note = 2'-Omethylcytosine
  modified_base 50: mod_base = OTHER; note = 2'-Omethylcytosine
  modified_base 51: mod_base = OTHER; note = 2'-Omethylguanosine
  modified_base 52: mod_base = OTHER; note = 2'-Omethylguanosine
  modified_base 53: mod_base = OTHER; note = 2'-Omethylguanosine
  modified_base 61: mod_base = OTHER; note = 2'-Omethylcytosine
  modified_base 62: mod_base = OTHER; note = 2'-Omethylcytosine
  modified_base 63: mod_base = OTHER; note = 2'-Omethylcytosine
  modified_base 64: mod_base = OTHER; note = 2'-Omethylguanosine
  modified_base 65: mod_base = OTHER; note = 2'-Omethylguanosine
  modified_base 66: mod_base = OTHER; note = 2'-Omethylcytosine
  modified_base 67: mod_base = OTHER; note = 2'-Omethylguanosine
  modified_base 68: mod_base = OTHER; note = 2'-Omethylguanosine
  modified_base 69: mod_base = OTHER; note = 2'-Omethyladenosine

SEQ ID NO: 9248 - RNA, 75 nt, synthetic construct; identical to SEQ ID NO: 3336
  source 1..75: mol_type = other RNA
  modified_base 1: mod_base = OTHER; note = 2'-Omethylcytosine
  modified_base 12: mod_base = OTHER; note = 2'-fluorocytosine phosphorothiorate
  modified_base 20: mod_base = OTHER; note = 2'-fluoroadenosine
  modified_base 23: mod_base = OTHER; note = 2'-fluoroguanosine
  modified_base 35: mod_base = OTHER; note = 2'-fluoroadenosine phosphorothiorate
  modified_base 47: mod_base = OTHER; note = 2'-fluorocytosine
  modified_base 73: mod_base = OTHER; note = Cytosine phosphorothiorate
  modified_base 74: mod_base = OTHER; note = 2'-Omethylcytosine

SEQ ID NO: 9249 - RNA, 75 nt, synthetic construct; identical to SEQ ID NO: 3336
  source 1..75: mol_type = other RNA
  modified_base 1: mod_base = OTHER; note = 2'-Omethylcytosine
  modified_base 2: mod_base = OTHER; note = Cytosine phosphorothiorate
  modified_base 5: mod_base = OTHER; note = 2'-fluoroguanosine
  modified_base 10: mod_base = OTHER; note = Cytosine phosphorothiorate
  modified_base 11: mod_base = OTHER; note = Uridine phosphorothiorate
  modified_base 15: mod_base = OTHER; note = 2'-Omethyluridine
  modified_base 19: mod_base = OTHER; note = 2'-fluorouridine
  modified_base 20: mod_base = OTHER; note = 2'-fluoroadenosine
  modified_base 23: mod_base = OTHER; note = 2'-fluoroguanosine
  modified_base 27: mod_base = OTHER; note = 2'-fluorocytosine
  modified_base 28: mod_base = OTHER; note = 2'-fluoroadenosine
  modified_base 35: mod_base = OTHER; note = 2'-fluoroadenosine phosphorothiorate
  modified_base 36: mod_base = OTHER; note = Adenosine phosphorothiorate
  modified_base 38: mod_base = OTHER; note = 2'-Omethyluridine
  modified_base 41: mod_base = OTHER; note = 2'-fluoroguanosine
  modified_base 47: mod_base = OTHER; note = 2'-fluorocytosine
  modified_base 48: mod_base = OTHER; note = 2'-fluorocytosine
  modified_base 56: mod_base = OTHER; note = 2'-Omethyladenosine phosphorothiorate
  modified_base 57: mod_base = OTHER; note = Adenosine phosphorothiorate
  modified_base 62: mod_base = OTHER; note = 2'-fluorocytosine phosphorothiorate
  modified_base 69: mod_base = OTHER; note = 2'-Omethylguanosine phosphorothiorate
  modified_base 73: mod_base = OTHER; note = Cytosine phosphorothiorate
  modified_base 74: mod_base = OTHER; note = 2'-Omethylcytosine

SEQ ID NO: 9250 - RNA, 75 nt, synthetic construct; identical to SEQ ID NO: 3311
  source 1..75: mol_type = other RNA
  modified_base 1: mod_base = OTHER; note = 2'-Omethylguanosine phosphorothiorate
  modified_base 2: mod_base = OTHER; note = 2'-fluoroguanosine phosphorothiorate
  modified_base 18: mod_base = OTHER; note = 2'-fluoroguanosine
  modified_base 19: mod_base = OTHER; note = 2'-fluorouridine
  modified_base 20: mod_base = OTHER; note = 2'-fluoroadenosine
  modified_base 23: mod_base = OTHER; note = Cytosine phosphorothiorate
  modified_base 24: mod_base = OTHER; note = 2'-fluoroadenosine phosphorothiorate
  modified_base 25: mod_base = OTHER; note = Cytosine phosphorothiorate
  modified_base 27: mod_base = OTHER; note = 2'-fluorocytosine
  modified_base 31: mod_base = OTHER; note = 2'-fluoroadenosine
  modified_base 34: mod_base = OTHER; note = 2'-fluorocytosine
  modified_base 44: mod_base = OTHER; note = 2'-fluorocytosine
  modified_base 48: mod_base = OTHER; note = 2'-fluorocytosine phosphorothiorate
  modified_base 63: mod_base = OTHER; note = 2'-fluoroguanosine phosphorothiorate
  modified_base 67: mod_base = OTHER; note = 2'-fluoroguanosine
  modified_base 71: mod_base = OTHER; note = 2'-fluorocytosine
  modified_base 75: mod_base = OTHER; note = 2'-Omethyladenosine

SEQ ID NO: 9251 - RNA, 75 nt, synthetic construct; identical to SEQ ID NO: 3306
  source 1..75: mol_type = other RNA
  modified_base 1: mod_base = OTHER; note = 2'-Omethylguanosine phosphorothiorate
  modified_base 2: mod_base = OTHER; note = 2'-Omethyladenosine phosphorothiorate
  modified_base 14: mod_base = OTHER; note = 2'-Omethyladenosine
  modified_base 17: mod_base = OTHER; note = 2'-Omethylguanosine
  modified_base 18: mod_base = OTHER; note = 2'-Omethylguanosine
  modified_base 21: mod_base = OTHER; note = 2'-Omethylguanosine
  modified_base 24: mod_base = OTHER; note = 2'-Omethylcytosine
  modified_base 26: mod_base = OTHER; note = 2'-Omethyluridine
  modified_base 32: mod_base = OTHER; note = 2'-fluorouridine
  modified_base 40: mod_base = OTHER; note = 2'-Omethyladenosine phosphorothiorate
  modified_base 43: mod_base = OTHER; note = 2'-Omethyladenosine
  modified_base 44: mod_base = OTHER; note = 2'-Omethylguanosine
  modified_base 45: mod_base = OTHER; note = 2'-fluoroguanosine
  modified_base 46: mod_base = OTHER; note = 2'-fluorouridine
  modified_base 47: mod_base = OTHER; note = 2'-fluorouridine
  modified_base 51: mod_base = OTHER; note = 2'-Omethyluridine
  modified_base 54: mod_base = OTHER; note = Uridine phosphorothiorate
  modified_base 70: mod_base = OTHER; note = 2'-Omethyluridine
  modified_base 72: mod_base = OTHER; note = 2'-Omethyladenosine

SEQ ID NO: 9252 - RNA, 76 nt, synthetic construct; identical to SEQ ID NO: 625
  source 1..76: mol_type = other RNA
  modified_base 1: mod_base = OTHER; note = 2'-Omethylguanosine phosphorothiorate
  modified_base 2: mod_base = OTHER; note = 2'-Omethylguanosine phosphorothiorate
  modified_base 3: mod_base = OTHER; note = 2'-Omethylcytosine
  modified_base 4: mod_base = OTHER; note = 2'-Omethyluridine
  modified_base 5: mod_base = OTHER; note = 2'-Omethylcytosine phosphorothiorate
  modified_base 12: mod_base = OTHER; note = 2'-Omethylguanosine
  modified_base 14: mod_base = OTHER; note = 2'-Omethyladenosine
  modified_base 15: mod_base = OTHER; note = Adenosine phosphorothiorate
  modified_base 16: mod_base = OTHER; note = 2'-Omethyluridine
  modified_base 18: mod_base = OTHER; note = 2'-fluoroguanosine phosphorothiorate
  modified_base 19: mod_base = OTHER; note = Adenosine phosphorothiorate
  modified_base 21: mod_base = OTHER; note = 2'-Omethyladenosine phosphorothiorate
  modified_base 22: mod_base = OTHER; note = Guanosine phosphorothiorate
  modified_base 23: mod_base = OTHER; note = 2'-Omethylcytosine
  modified_base 24: mod_base = OTHER; note = 2'-Omethylguanosine
  modified_base 25: mod_base = OTHER; note = 2'-Omethylcytosine
  modified_base 26: mod_base = OTHER; note = 2'-fluoroadenosine phosphorothiorate
  modified_base 29: mod_base = OTHER; note = 2'-Omethylguanosine phosphorothiorate
  modified_base 30: mod_base = OTHER; note = 2'-fluoroguanosine phosphorothiorate
  modified_base 31: mod_base = OTHER; note = 2'-Omethyladenosine phosphorothiorate
  modified_base 33: mod_base = OTHER; note = 2'-fluorouridine
  modified_base 35: mod_base = OTHER; note = 2'-Omethylcytosine phosphorothiorate
  modified_base 38: mod_base = OTHER; note = 2'-Omethyladenosine phosphorothiorate
  modified_base 41: mod_base = OTHER; note = 2'-Omethylcytosine
  modified_base 42: mod_base = OTHER; note = Adenosine phosphorothiorate
  modified_base 45: mod_base = OTHER; note = 2'-fluoroguanosine
  modified_base 49: mod_base = OTHER; note = 2'-Omethylcytosine
  modified_base 50: mod_base = OTHER; note = 2'-Omethylcytosine
  modified_base 51: mod_base = OTHER; note = 2'-Omethylguanosine
  modified_base 52: mod_base = OTHER; note = 2'-Omethylguanosine
  modified_base 53: mod_base = OTHER; note = 2'-fluoroguanosine
  modified_base 54: mod_base = OTHER; note = Uridine phosphorothiorate
  modified_base 55: mod_base = OTHER; note = Uridine phosphorothiorate
  modified_base 59: mod_base = OTHER; note = 2'-Omethylguanosine
  modified_base 62: mod_base = OTHER; note = 2'-Omethylcytosine phosphorothiorate
  modified_base 63: mod_base = OTHER; note = 2'-Omethylcytosine phosphorothiorate
  modified_base 65: mod_base = OTHER; note = 2'-Omethylguanosine phosphorothiorate
  modified_base 66: mod_base = OTHER; note = 2'-fluorocytosine
  modified_base 67: mod_base = OTHER; note = 2'-fluoroguanosine
  modified_base 68: mod_base = OTHER; note = 2'-fluoroguanosine
  modified_base 69: mod_base = OTHER; note = 2'-fluoroadenosine phosphorothiorate
  modified_base 72: mod_base = OTHER; note = 2'-Omethylcytosine phosphorothiorate
  modified_base 73: mod_base = OTHER; note = 2'-fluoroguanosine phosphorothiorate
  modified_base 75: mod_base = OTHER; note = 2'-fluorocytosine
  modified_base 76: mod_base = OTHER; note = 2'-Omethyladenosine

SEQ ID NO: 9253 - RNA, 76 nt, synthetic construct; identical to SEQ ID NO: 625
  source 1..76: mol_type = other RNA
  modified_base 1: mod_base = OTHER; note = 2'-Omethylguanosine phosphorothiorate
  modified_base 2: mod_base = OTHER; note = 2'-Omethylguanosine
  modified_base 13: mod_base = OTHER; note = 2'-Omethylcytosine
  modified_base 33: mod_base = OTHER; note = 2'-fluorouridine
  modified_base 35: mod_base = OTHER; note = Cytosine phosphorothiorate
  modified_base 37: mod_base = OTHER; note = Adenosine phosphorothiorate
  modified_base 52: mod_base = OTHER; note = 2'-fluoroguanosine
  modified_base 57: mod_base = OTHER; note = 2'-Omethylguanosine
  modified_base 62: mod_base = OTHER; note = 2'-Omethylcytosine
  modified_base 73: mod_base = OTHER; note = 2'-Omethylguanosine
  modified_base 75: mod_base = OTHER; note = 2'-fluorocytosine phosphorothiorate
  modified_base 76: mod_base = OTHER; note = 2'-Omethyladenosine

SEQ ID NO: 9254 - RNA, 75 nt, synthetic construct; identical to SEQ ID NO: 3306
  source 1..75: mol_type = other RNA
  modified_base 1: mod_base = OTHER; note = 2'-Omethylguanosine phosphorothiorate

SEQ ID NO: 9255 - RNA, 75 nt, synthetic construct; identical to SEQ ID NO: 1045
  source 1..75: mol_type = other RNA
  modified_base 1: mod_base = OTHER; note = 2'-Omethylguanosine phosphorothiorate
  modified_base 2: mod_base = OTHER; note = 2'-fluoroguanosine phosphorothiorate
  modified_base 18: mod_base = OTHER; note = 2'-fluoroguanosine
  modified_base 19: mod_base = OTHER; note = 2'-fluorouridine
  modified_base 20: mod_base = OTHER; note = 2'-fluoroadenosine
  modified_base 23: mod_base = OTHER; note = Cytosine phosphorothiorate
  modified_base 24: mod_base = OTHER; note = 2'-fluoroadenosine phosphorothiorate
  modified_base 25: mod_base = OTHER; note = Cytosine phosphorothiorate
  modified_base 27: mod_base = OTHER; note = 2'-fluorocytosine
  modified_base 31: mod_base = OTHER; note = 2'-fluoroadenosine
  modified_base 34: mod_base = OTHER; note = 2'-fluorouridine
  modified_base 44: mod_base = OTHER; note = 2'-fluorocytosine
  modified_base 48: mod_base = OTHER; note = 2'-fluorocytosine phosphorothiorate
  modified_base 63: mod_base = OTHER; note = 2'-fluoroguanosine phosphorothiorate
  modified_base 67: mod_base = OTHER; note = 2'-fluoroguanosine
  modified_base 71: mod_base = OTHER; note = 2'-fluorocytosine
  modified_base 75: mod_base = OTHER; note = 2'-Omethyladenosine

SEQ ID NO: 9256 - DNA, 76 bp, synthetic construct; identical to SEQ ID NO: 1924
  source 1..76: mol_type = other DNA
  modified_base 1: mod_base = OTHER; note = 2'-Omethylguanosine phosphorothiorate
  modified_base 2: mod_base = OTHER; note = 2'-Omethylguanosine
  modified_base 3: mod_base = OTHER; note = 2'-Omethylcytosine
  modified_base 4: mod_base = OTHER; note = 2'-Omethyluridine
  modified_base 5: mod_base = OTHER; note = 2'-Omethylcytosine
  modified_base 6: mod_base = OTHER; note = 2'-Omethylcytosine
  modified_base 13: mod_base = OTHER; note = 2'-Omethylcytosine
  modified_base 14: mod_base = OTHER; note = 2'-Omethyladenosine
  modified_base 15: mod_base = OTHER; note = 2'-fluoroadenosine
  modified_base 16: mod_base = OTHER; note = 2'-Omethyluridine
  modified_base 17: mod_base = OTHER; note = 2'-Omethylguanosine
  modified_base 18: mod_base = OTHER; note = 2'-Omethylguanosine
  modified_base 19: mod_base = OTHER; note = 2'-fluoroadenosine
  modified_base 20: mod_base = OTHER; note = 2'-Omethyluridine
  modified_base 21: mod_base = OTHER; note = Adenosine phosphorothiorate
  modified_base 25: mod_base = OTHER; note = 2'-Omethylcytosine
  modified_base 33: mod_base = OTHER; note = 2'-fluorouridine
  modified_base 35: mod_base = OTHER; note = Cytosine phosphorothiorate
  modified_base 37: mod_base = OTHER; note = Adenosine phosphorothiorate
  modified_base 38: mod_base = OTHER; note = Adenosine phosphorothiorate
  modified_base 44: mod_base = OTHER; note = Adenosine phosphorothiorate
  modified_base 45: mod_base = OTHER; note = 2'-fluoroguanosine
  modified_base 49: mod_base = OTHER; note = 2'-Omethylcytosine
  modified_base 50: mod_base = OTHER; note = 2'-Omethylcytosine
  modified_base 51: mod_base = OTHER; note = 2'-Omethylguanosine
  modified_base 52: mod_base = OTHER; note = 2'-Omethylguanosine
  modified_base 53: mod_base = OTHER; note = 2'-Omethylguanosine
  modified_base 54: mod_base = OTHER; note = 2'-Omethyluridine
  modified_base 56: mod_base = OTHER; note = 2'-Omethylcytosine
  modified_base 57: mod_base = OTHER; note = 2'-fluoroguanosine
  modified_base 59: mod_base = OTHER; note = 2'-Omethylguanosine
  modified_base 61: mod_base = OTHER; note = 2'-Omethylcytosine
  modified_base 62: mod_base = OTHER; note = 2'-Omethylcytosine
  modified_base 63: mod_base = OTHER; note = 2'-fluorocytosine
  modified_base 64: mod_base = OTHER; note = 2'-Omethylguanosine
  modified_base 65: mod_base = OTHER; note = 2'-Omethylguanosine
  modified_base 66: mod_base = OTHER; note = 2'-Omethylcytosine
  modified_base 67: mod_base = OTHER; note = 2'-Omethylguanosine
  modified_base 68: mod_base = OTHER; note = 2'-Omethylguanosine
  modified_base 69: mod_base = OTHER; note = 2'-fluoroadenosine
  modified_base 71: mod_base = OTHER; note = 2'-Omethyluridine
  modified_base 73: mod_base = OTHER; note = 2'-Omethylguanosine
  modified_base 74: mod_base = OTHER; note = 2'-fluorocytosine phosphorothiorate
  modified_base 75: mod_base = OTHER; note = 2'-fluorocytosine phosphorothiorate
  misc_feature 1..21: note = RNA
  misc_feature 22: note = DNA
  misc_feature 23..76: note = RNA

SEQ ID NO: 9257 - RNA, 76 nt, synthetic construct; identical to SEQ ID NO: 625
  source 1..76: mol_type = other RNA
  modified_base 1: mod_base = OTHER; note = 2'-Omethylguanosine phosphorothiorate
  modified_base 2: mod_base = OTHER; note = 2'-Omethylguanosine
  modified_base 13: mod_base = OTHER; note = 2'-Omethylcytosine
  modified_base 33: mod_base = OTHER; note = 2'-fluorouridine
  modified_base 35: mod_base = OTHER; note = Cytosine phosphorothiorate
  modified_base 52: mod_base = OTHER; note = 2'-Omethylguanosine
  modified_base 57: mod_base = OTHER; note = 2'-Omethylguanosine
  modified_base 62: mod_base = OTHER; note = 2'-Omethylcytosine
  modified_base 73: mod_base = OTHER; note = 2'-Omethylguanosine
  modified_base 75: mod_base = OTHER; note = 2'-fluorocytosine phosphorothiorate
  modified_base 76: mod_base = OTHER; note = 2'-Omethyladenosine

SEQ ID NO: 9258 - RNA, 83 nt, synthetic construct; identical to SEQ ID NO: 6504
  source 1..83: mol_type = other RNA
  modified_base 65: mod_base = OTHER; note = Uridine phosphorothiorate

SEQ ID NO: 9259 - RNA, 85 nt, synthetic construct; identical to SEQ ID NO: 3317
  source 1..85: mol_type = other RNA
  modified_base 1: mod_base = OTHER; note = 2'-Omethylguanosine phosphorothiorate
  modified_base 2: mod_base = OTHER; note = 2'-Omethylcytosine
  modified_base 5: mod_base = OTHER; note = 2'-Omethyluridine phosphorothiorate
  modified_base 11: mod_base = OTHER; note = 2'-fluorocytosine
  modified_base 12: mod_base = OTHER; note = 2'-fluorocytosine
  modified_base 13: mod_base = OTHER; note = 2'-fluoroguanosine
  modified_base 22: mod_base = OTHER; note = 2'-Omethyladenosine phosphorothiorate
  modified_base 23: mod_base = OTHER; note = 2'-fluoroguanosine
  modified_base 25: mod_base = OTHER; note = Cytosine phosphorothiorate
  modified_base 33: mod_base = OTHER; note = 2'-fluorouridine
  modified_base 54: mod_base = OTHER; note = 2'-Omethylcytosine
  modified_base 56: mod_base = OTHER; note = 2'-Omethylguanosine
  modified_base 58: mod_base = OTHER; note = 2'-fluoroguanosine
  modified_base 60: mod_base = OTHER; note = 2'-Omethyladenosine
  modified_base 62: mod_base = OTHER; note = 2'-Omethylguanosine
  modified_base 71: mod_base = OTHER; note = 2'-fluorocytosine phosphorothiorate
  modified_base 74: mod_base = OTHER; note = 2'-fluorocytosine phosphorothiorate
  modified_base 81: mod_base = OTHER; note = 2'-fluorocytosine
  modified_base 82: mod_base = OTHER; note = 2'-fluoroguanosine

SEQ ID NO: 9260 - RNA, 85 nt, synthetic construct; identical to SEQ ID NO: 3288
  source 1..85: mol_type = other RNA
  modified_base 1: mod_base = OTHER; note = 2'-Omethylcytosine
  modified_base 3: mod_base = OTHER; note = 2'-fluoroadenosine
  modified_base 11: mod_base = OTHER; note = Cytosine phosphorothiorate
  modified_base 23: mod_base = OTHER; note = 2'-fluoroguanosine
  modified_base 27: mod_base = OTHER; note = 2'-fluorouridine
  modified_base 30: mod_base = OTHER; note = 2'-fluoroadenosine
  modified_base 34: mod_base = OTHER; note = Cytosine phosphorothiorate
  modified_base 43: mod_base = OTHER; note = 2'-Omethyluridine
  modified_base 46: mod_base = OTHER; note = Adenosine phosphorothiorate
  modified_base 47: mod_base = OTHER; note = 2'-fluorocytosine
  modified_base 48: mod_base = OTHER; note = 2'-fluoroadenosine phosphorothiorate
  modified_base 54: mod_base = OTHER; note = 2'-Omethylcytosine
  modified_base 56: mod_base = OTHER; note = 2'-fluoroguanosine
  modified_base 57: mod_base = OTHER; note = 2'-Omethylcytosine
  modified_base 59: mod_base = OTHER; note = 2'-fluorouridine phosphorothiorate
  modified_base 79: mod_base = OTHER; note = 2'-fluoroguanosine
  modified_base 80: mod_base = OTHER; note = 2'-Omethylguanosine
  modified_base 84: mod_base = OTHER; note = 2'-Omethylcytosine phosphorothiorate

SEQ ID NO: 9261 - RNA, 76 nt, synthetic construct; identical to SEQ ID NO: 625
  source 1..76: mol_type = other RNA
  modified_base 1: mod_base = OTHER; note = 2'-Omethylguanosine phosphorothiorate
  modified_base 2: mod_base = OTHER; note = 2'-Omethylguanosine phosphorothiorate
  modified_base 45: mod_base = OTHER; note = 2'-fluoroguanosine
  modified_base 57: mod_base = OTHER; note = 2'-fluoroguanosine
  modified_base 68: mod_base = OTHER; note = 2'-fluoroguanosine
  modified_base 73: mod_base = OTHER; note = Guanosine phosphorothiorate
  modified_base 74: mod_base = OTHER; note = Cytosine phosphorothiorate
  modified_base 75: mod_base = OTHER; note = 2'-Omethylcytosine phosphorothiorate
  modified_base 76: mod_base = OTHER; note = 2'-Omethyladenosine

SEQ ID NO: 9262 - RNA, 76 nt, synthetic construct; identical to SEQ ID NO: 625
  source 1..76: mol_type = other RNA
  modified_base 2: mod_base = OTHER; note = 2'-fluoroguanosine
  modified_base 3: mod_base = OTHER; note = Cytosine phosphorothiorate
  modified_base 4: mod_base = OTHER; note = 2'-fluorouridine
  modified_base 5: mod_base = OTHER; note = 2'-fluorocytosine
  modified_base 6: mod_base = OTHER; note = 2'-Omethylcytosine
  modified_base 9: mod_base = OTHER; note = Guanosine phosphorothiorate
  modified_base 10: mod_base = OTHER; note = 2'-Omethylguanosine phosphorothiorate
  modified_base 11: mod_base = OTHER; note = 2'-Omethylcytosine
  modified_base 13: mod_base = OTHER; note = Cytosine phosphorothiorate
  modified_base 15: mod_base = OTHER; note = Adenosine phosphorothiorate
  modified_base 23: mod_base = OTHER; note = 2'-Omethylcytosine
  modified_base 27: mod_base = OTHER; note = 2'-fluorouridine
  modified_base 32: mod_base = OTHER; note = 2'-fluorocytosine
  modified_base 36: mod_base = OTHER; note = Adenosine phosphorothiorate
  modified_base 37: mod_base = OTHER; note = Adenosine phosphorothiorate
  modified_base 39: mod_base = OTHER; note = 2'-fluorouridine
  modified_base 40: mod_base = OTHER; note = 2'-fluorouridine phosphorothiorate
  modified_base 50: mod_base = OTHER; note = Cytosine phosphorothiorate
  modified_base 51: mod_base = OTHER; note = Guanosine phosphorothiorate
  modified_base 52: mod_base = OTHER; note = 2'-fluoroguanosine
  modified_base 54: mod_base = OTHER; note = 2'-fluorouridine
  modified_base 56: mod_base = OTHER; note = 2'-fluorocytosine
  modified_base 57: mod_base = OTHER; note = 2'-fluoroguanosine
  modified_base 61: mod_base = OTHER; note = 2'-fluorocytosine
  modified_base 62: mod_base = OTHER; note = 2'-Omethylcytosine
  modified_base 63: mod_base = OTHER; note = 2'-fluorocytosine
  modified_base 65: mod_base = OTHER; note = 2'-fluoroguanosine
  modified_base 70: mod_base = OTHER; note = 2'-fluoroguanosine
  modified_base 73: mod_base = OTHER; note = Guanosine phosphorothiorate
  modified_base 74: mod_base = OTHER; note = Cytosine phosphorothiorate
  modified_base 75: mod_base = OTHER; note = 2'-fluorocytosine phosphorothiorate
  modified_base 76: mod_base = OTHER; note = 2'-fluoroadenosine

SEQ ID NO: 9263 - RNA, 76 nt, synthetic construct; identical to SEQ ID NO: 625
  source 1..76: mol_type = other RNA
  modified_base 1: mod_base = OTHER; note = 2'-Omethylguanosine phosphorothiorate
  modified_base 2: mod_base = OTHER; note = 2'-Omethylguanosine
  modified_base 3: mod_base = OTHER; note = 2'-Omethylcytosine
  modified_base 4: mod_base = OTHER; note = 2'-Omethyluridine
  modified_base 5: mod_base = OTHER; note = 2'-Omethylcytosine
  modified_base 6: mod_base = OTHER; note = 2'-Omethylcytosine
  modified_base 10: mod_base = OTHER; note = 2'-Omethylguanosine
  modified_base 11: mod_base = OTHER; note = 2'-Omethylcytosine
  modified_base 12: mod_base = OTHER; note = 2'-Omethylguanosine
  modified_base 13: mod_base = OTHER; note = 2'-Omethylcytosine
  modified_base 14: mod_base = OTHER; note = 2'-Omethyladenosine
  modified_base 15: mod_base = OTHER; note = 2'-Omethyladenosine
  modified_base 16: mod_base = OTHER; note = 2'-Omethyluridine
  modified_base 17: mod_base = OTHER; note = 2'-Omethylguanosine
  modified_base 18: mod_base = OTHER; note = 2'-Omethylguanosine
  modified_base 20: mod_base = OTHER; note = 2'-Omethyluridine
  modified_base 22: mod_base = OTHER; note = 2'-Omethylguanosine
  modified_base 23: mod_base = OTHER; note = 2'-Omethylcytosine
  modified_base 24: mod_base = OTHER; note = 2'-Omethylguanosine
  modified_base 25: mod_base = OTHER; note = 2'-Omethylcytosine
  modified_base 33: mod_base = OTHER; note = 2'-fluorouridine
  modified_base 35: mod_base = OTHER; note = Cytosine phosphorothiorate
  modified_base 37: mod_base = OTHER; note = Adenosine phosphorothiorate
  modified_base 38: mod_base = OTHER; note = Adenosine phosphorothiorate
  modified_base 49: mod_base = OTHER; note = 2'-Omethylcytosine
  modified_base 50: mod_base = OTHER; note = 2'-Omethylcytosine
  modified_base 52: mod_base = OTHER; note = 2'-Omethylguanosine
  modified_base 54: mod_base = OTHER; note = 2'-Omethyluridine
  modified_base 55: mod_base = OTHER; note = Uridine phosphorothiorate
  modified_base 56: mod_base = OTHER; note = 2'-Omethylcytosine
  modified_base 57: mod_base = OTHER; note = 2'-fluoroguanosine
  modified_base 59: mod_base = OTHER; note = 2'-Omethylguanosine
  modified_base 61: mod_base = OTHER; note = 2'-Omethylcytosine
  modified_base 65: mod_base = OTHER; note = 2'-Omethylguanosine
  modified_base 73: mod_base = OTHER; note = 2'-Omethylguanosine

SEQ ID NO: 9264 - RNA, 76 nt, synthetic construct; identical to SEQ ID NO: 625
  source 1..76: mol_type = other RNA
  modified_base 8: mod_base = OTHER; note = Uridine phosphorothiorate
  modified_base 9: mod_base = OTHER; note = Guanosine phosphorothiorate

SEQ ID NO: 9265 - RNA, 75 nt, synthetic construct; identical to SEQ ID NO: 1045
  source 1..75: mol_type = other RNA
  modified_base 1: mod_base = OTHER; note = 2'-Omethylguanosine
  modified_base 2: mod_base = OTHER; note = 2'-Omethylguanosine
  modified_base 3: mod_base = OTHER; note = 2'-Omethyluridine
  modified_base 4: mod_base = OTHER; note = 2'-Omethyluridine
  modified_base 5: mod_base = OTHER; note = 2'-Omethylcytosine
  modified_base 6: mod_base = OTHER; note = 2'-Omethylcytosine
  modified_base 14: mod_base = OTHER; note = 2'-Omethyladenosine
  modified_base 15: mod_base = OTHER; note = 2'-Omethyladenosine
  modified_base 16: mod_base = OTHER; note = 2'-Omethyluridine
  modified_base 17: mod_base = OTHER; note = 2'-Omethylguanosine
  modified_base 18: mod_base = OTHER; note = 2'-Omethylguanosine
  modified_base 20: mod_base = OTHER; note = 2'-Omethyladenosine
  modified_base 25: mod_base = OTHER; note = 2'-Omethylcytosine
  modified_base 33: mod_base = OTHER; note = 2'-fluorouridine
  modified_base 35: mod_base = OTHER; note = Uridine phosphorothiorate
  modified_base 37: mod_base = OTHER; note = Adenosine phosphorothiorate
  modified_base 38: mod_base = OTHER; note = Adenosine phosphorothiorate
  modified_base 48: mod_base = OTHER; note = 2'-Omethylcytosine
  modified_base 49: mod_base = OTHER; note = 2'-Omethylcytosine
  modified_base 51: mod_base = OTHER; note = 2'-Omethyladenosine
  modified_base 53: mod_base = OTHER; note = 2'-Omethyluridine
  modified_base 54: mod_base = OTHER; note = Uridine phosphorothiorate
  modified_base 55: mod_base = OTHER; note = 2'-Omethylcytosine
  modified_base 56: mod_base = OTHER; note = 2'-fluoroguanosine
  modified_base 58: mod_base = OTHER; note = 2'-Omethylguanosine
  modified_base 60: mod_base = OTHER; note = 2'-Omethylcytosine
  modified_base 61: mod_base = OTHER; note = 2'-Omethyluridine
  modified_base 62: mod_base = OTHER; note = 2'-fluorocytosine
  modified_base 63: mod_base = OTHER; note = 2'-Omethylguanosine
  modified_base 64: mod_base = OTHER; note = 2'-Omethylguanosine
  modified_base 72: mod_base = OTHER; note = 2'-Omethyluridine

SEQ ID NO: 9266 - RNA, 76 nt, synthetic construct; identical to SEQ ID NO: 625
  source 1..76: mol_type = other RNA
  modified_base 1: mod_base = OTHER; note = 2'-Omethylguanosine phosphorothiorate
  modified_base 2: mod_base = OTHER; note = 2'-Omethylguanosine phosphorothiorate
  modified_base 5: mod_base = OTHER; note = 2'-Omethylcytosine phosphorothiorate
  modified_base 6: mod_base = OTHER; note = 2'-Omethylcytosine
  modified_base 10: mod_base = OTHER; note = 2'-fluoroguanosine
  modified_base 16: mod_base = OTHER; note = 2'-fluorouridine phosphorothiorate
  modified_base 17: mod_base = OTHER; note = 2'-Omethylguanosine
  modified_base 18: mod_base = OTHER; note = Guanosine phosphorothiorate
  modified_base 20: mod_base = OTHER; note = 2'-fluorouridine
  modified_base 22: mod_base = OTHER; note = 2'-fluoroguanosine
  modified_base 25: mod_base = OTHER; note = Cytosine phosphorothiorate
  modified_base 26: mod_base = OTHER; note = 2'-fluoroadenosine
  modified_base 34: mod_base = OTHER; note = 2'-fluorouridine phosphorothiorate
  modified_base 38: mod_base = OTHER; note = 2'-Omethyladenosine
  modified_base 40: mod_base = OTHER; note = 2'-Omethyluridine
  modified_base 41: mod_base = OTHER; note = Cytosine phosphorothiorate
  modified_base 43: mod_base = OTHER; note = 2'-fluoroadenosine
  modified_base 44: mod_base = OTHER; note = 2'-Omethyladenosine phosphorothiorate
  modified_base 47: mod_base = OTHER; note = 2'-Omethyluridine
  modified_base 49: mod_base = OTHER; note = Cytosine phosphorothiorate
  modified_base 50: mod_base = OTHER; note = 2'-fluorocytosine
  modified_base 53: mod_base = OTHER; note = 2'-Omethylguanosine
  modified_base 60: mod_base = OTHER; note = 2'-fluorouridine
  modified_base 62: mod_base = OTHER; note = 2'-Omethylcytosine
  modified_base 63: mod_base = OTHER; note = 2'-Omethylcytosine
  modified_base 64: mod_base = OTHER; note = Guanosine phosphorothiorate
  modified_base 65: mod_base = OTHER; note = 2'-fluoroguanosine
  modified_base 67: mod_base = OTHER; note = 2'-fluoroguanosine
  modified_base 68: mod_base = OTHER; note = 2'-Omethylguanosine
  modified_base 71: mod_base = OTHER; note = 2'-Omethyluridine
  modified_base 72: mod_base = OTHER; note = 2'-fluorocytosine
  modified_base 74: mod_base = OTHER; note = Cytosine phosphorothiorate

SEQ ID NO: 9267 - RNA, 75 nt, synthetic construct; identical to SEQ ID NO: 1045
  source 1..75: mol_type = other RNA
  modified_base 1: mod_base = OTHER; note = 2'-Omethylguanosine
  modified_base 2: mod_base = OTHER; note = 2'-Omethylguanosine
  modified_base 3: mod_base = OTHER; note = 2'-Omethyluridine
  modified_base 4: mod_base = OTHER; note = 2'-Omethyluridine
  modified_base 5: mod_base = OTHER; note = 2'-Omethylcytosine
  modified_base 6: mod_base = OTHER; note = 2'-Omethylcytosine
  modified_base 14: mod_base = OTHER; note = 2'-Omethyladenosine
  modified_base 15: mod_base = OTHER; note = 2'-Omethyladenosine
  modified_base 16: mod_base = OTHER; note = 2'-Omethyluridine
  modified_base 17: mod_base = OTHER; note = 2'-Omethylguanosine
  modified_base 18: mod_base = OTHER; note = 2'-Omethylguanosine
  modified_base 20: mod_base = OTHER; note = 2'-Omethyladenosine
  modified_base 22: mod_base = OTHER; note = 2'-Omethylguanosine
  modified_base 23: mod_base = OTHER; note = 2'-Omethylcytosine
  modified_base 24: mod_base = OTHER; note = 2'-Omethyladenosine
  modified_base 25: mod_base = OTHER; note = 2'-Omethylcytosine
  modified_base 33: mod_base = OTHER; note = 2'-fluorouridine
  modified_base 35: mod_base = OTHER; note = Uridine phosphorothiorate
  modified_base 37: mod_base = OTHER; note = Adenosine phosphorothiorate
  modified_base 38: mod_base = OTHER; note = Adenosine phosphorothiorate
  modified_base 41: mod_base = OTHER; note = 2'-Omethylcytosine
  modified_base 42: mod_base = OTHER; note = 2'-Omethyladenosine
  modified_base 43: mod_base = OTHER; note = 2'-Omethylguanosine
  modified_base 44: mod_base = OTHER; note = 2'-Omethylcytosine
  modified_base 48: mod_base = OTHER; note = 2'-Omethylcytosine
  modified_base 49: mod_base = OTHER; note = 2'-Omethylcytosine
  modified_base 51: mod_base = OTHER; note = 2'-Omethyladenosine
  modified_base 53: mod_base = OTHER; note = 2'-Omethyluridine
  modified_base 54: mod_base = OTHER; note = Uridine phosphorothiorate
  modified_base 55: mod_base = OTHER; note = 2'-Omethylcytosine
  modified_base 56: mod_base = OTHER; note = 2'-fluoroguanosine
  modified_base 58: mod_base = OTHER; note = 2'-Omethylguanosine
  modified_base 60: mod_base = OTHER; note = 2'-Omethylcytosine
  modified_base 64: mod_base = OTHER; note = 2'-Omethylguanosine
  modified_base 72: mod_base = OTHER; note = 2'-Omethyluridine

SEQ ID NO: 9268 - RNA, 76 nt, synthetic construct; identical to SEQ ID NO: 3325
  source 1..76: mol_type = other RNA
  modified_base 1: mod_base = OTHER; note = 2'-Omethyluridine
  modified_base 2: mod_base = OTHER; note = 2'-Omethyladenosine
  modified_base 3: mod_base = OTHER; note = 2'-Omethylcytosine
  modified_base 4: mod_base = OTHER; note = 2'-Omethyladenosine
  modified_base 5: mod_base = OTHER; note = 2'-Omethylcytosine
  modified_base 6: mod_base = OTHER; note = 2'-Omethylcytosine
  modified_base 13: mod_base = OTHER; note = 2'-Omethylcytosine
  modified_base 14: mod_base = OTHER; note = 2'-Omethyladenosine
  modified_base 15: mod_base = OTHER; note = 2'-Omethyladenosine
  modified_base 16: mod_base = OTHER; note = 2'-Omethyluridine
  modified_base 17: mod_base = OTHER; note = 2'-Omethylguanosine
  modified_base 18: mod_base = OTHER; note = 2'-Omethylguanosine
  modified_base 19: mod_base = OTHER; note = Adenosine phosphorothiorate
  modified_base 20: mod_base = OTHER; note = 2'-Omethyluridine
  modified_base 21: mod_base = OTHER; note = Adenosine phosphorothiorate
  modified_base 25: mod_base = OTHER; note = 2'-Omethylcytosine
  modified_base 33: mod_base = OTHER; note = Uridine phosphorothiorate
  modified_base 34: mod_base = OTHER; note = 2'-Omethyluridine
  modified_base 35: mod_base = OTHER; note = Cytosine phosphorothiorate
  modified_base 37: mod_base = OTHER; note = Adenosine phosphorothiorate
  modified_base 38: mod_base = OTHER; note = Adenosine phosphorothiorate
  modified_base 49: mod_base = OTHER; note = 2'-Omethylcytosine
  modified_base 50: mod_base = OTHER; note = 2'-Omethylcytosine
  modified_base 51: mod_base = OTHER; note = 2'-Omethylguanosine
  modified_base 52: mod_base = OTHER; note = 2'-Omethylguanosine
  modified_base 53: mod_base = OTHER; note = 2'-Omethylguanosine
  modified_base 54: mod_base = OTHER; note = Uridine phosphorothiorate
  modified_base 55: mod_base = OTHER; note = Uridine phosphorothiorate
  modified_base 61: mod_base = OTHER; note = 2'-Omethylcytosine
  modified_base 65: mod_base = OTHER; note = 2'-Omethylguanosine
  modified_base 73: mod_base = OTHER; note = 2'-Omethylguanosine

SEQ ID NO: 9269 - RNA, 76 nt, synthetic construct; identical to SEQ ID NO: 625
  source 1..76: mol_type = other RNA
  modified_base 1: mod_base = OTHER; note = 2'-fluoroguanosine
  modified_base 3: mod_base = OTHER; note = Cytosine phosphorothiorate
  modified_base 4: mod_base = OTHER; note = 2'-fluorouridine phosphorothiorate
  modified_base 5: mod_base = OTHER; note = 2'-Omethylcytosine
  modified_base 6: mod_base = OTHER; note = 2'-fluorocytosine
  modified_base 14: mod_base = OTHER; note = 2'-fluoroadenosine
  modified_base 16: mod_base = OTHER; note = 2'-Omethyluridine
  modified_base 24: mod_base = OTHER; note = 2'-Omethylguanosine
  modified_base 26: mod_base = OTHER; note = 2'-Omethyladenosine
  modified_base 28: mod_base = OTHER; note = 2'-Omethyluridine
  modified_base 29: mod_base = OTHER; note = 2'-Omethylguanosine
  modified_base 30: mod_base = OTHER; note = Guanosine phosphorothiorate
  modified_base 31: mod_base = OTHER; note = 2'-Omethyladenosine
  modified_base 36: mod_base = OTHER; note = Adenosine phosphorothiorate
  modified_base 38: mod_base = OTHER; note = Adenosine phosphorothiorate
  modified_base 39: mod_base = OTHER; note = 2'-Omethyluridine
  modified_base 47: mod_base = OTHER; note = 2'-Omethyluridine
  modified_base 48: mod_base = OTHER; note = 2'-Omethyluridine
  modified_base 49: mod_base = OTHER; note = 2'-fluorocytosine
  modified_base 51: mod_base = OTHER; note = 2'-Omethylguanosine
  modified_base 52: mod_base = OTHER; note = 2'-Omethylguanosine
  modified_base 53: mod_base = OTHER; note = 2'-fluoroguanosine phosphorothiorate
  modified_base 60: mod_base = OTHER; note = 2'-fluorouridine
  modified_base 61: mod_base = OTHER; note = 2'-Omethylcytosine
  modified_base 62: mod_base = OTHER; note = Cytosine phosphorothiorate
  modified_base 63: mod_base = OTHER; note = 2'-Omethylcytosine phosphorothiorate
  modified_base 64: mod_base = OTHER; note = 2'-fluoroguanosine phosphorothiorate
  modified_base 66: mod_base = OTHER; note = 2'-fluorocytosine
  modified_base 67: mod_base = OTHER; note = Guanosine phosphorothiorate
  modified_base 69: mod_base = OTHER; note = 2'-Omethyladenosine
  modified_base 71: mod_base = OTHER; note = 2'-Omethyluridine
  modified_base 72: mod_base = OTHER; note = 2'-fluorocytosine
  modified_base 73: mod_base = OTHER; note = 2'-Omethylguanosine
  modified_base 75: mod_base = OTHER; note = Cytosine phosphorothiorate
  modified_base 76: mod_base = OTHER; note = 2'-fluoroadenosine

SEQ ID NO: 9270 - RNA, 75 nt, synthetic construct; identical to SEQ ID NO: 3306
  source 1..75: mol_type = other RNA
  modified_base 1: mod_base = OTHER; note = 2'-Omethylguanosine
  modified_base 2: mod_base = OTHER; note = 2'-Omethyladenosine
  modified_base 3: mod_base = OTHER; note = 2'-Omethylcytosine
  modified_base 4: mod_base = OTHER; note = 2'-Omethylcytosine
  modified_base 5: mod_base = OTHER; note = 2'-Omethyluridine
  modified_base 6: mod_base = OTHER; note = 2'-Omethylcytosine
  modified_base 10: mod_base = OTHER; note = 2'-Omethylguanosine
  modified_base 11: mod_base = OTHER; note = 2'-Omethylcytosine
  modified_base 12: mod_base = OTHER; note = 2'-Omethylguanosine
  modified_base 13: mod_base = OTHER; note = 2'-Omethylcytosine
  modified_base 21: mod_base = OTHER; note = 2'-Omethylguanosine
  modified_base 22: mod_base = OTHER; note = 2'-Omethylcytosine
  modified_base 23: mod_base = OTHER; note = 2'-Omethylguanosine
  modified_base 24: mod_base = OTHER; note = 2'-Omethylcytosine
  modified_base 48: mod_base = OTHER; note = 2'-Omethylguanosine
  modified_base 49: mod_base = OTHER; note = 2'-Omethylcytosine
  modified_base 50: mod_base = OTHER; note = 2'-Omethylguanosine
  modified_base 51: mod_base = OTHER; note = 2'-Omethyluridine
  modified_base 52: mod_base = OTHER; note = 2'-Omethylguanosine
  modified_base 60: mod_base = OTHER; note = 2'-Omethylcytosine
  modified_base 61: mod_base = OTHER; note = 2'-Omethyladenosine
  modified_base 62: mod_base = OTHER; note = 2'-fluorocytosine
  modified_base 63: mod_base = OTHER; note = 2'-Omethylguanosine
  modified_base 64: mod_base = OTHER; note = 2'-Omethyluridine
  modified_base 65: mod_base = OTHER; note = 2'-Omethylcytosine
  modified_base 66: mod_base = OTHER; note = 2'-Omethylguanosine
  modified_base 67: mod_base = OTHER; note = 2'-Omethylguanosine
  modified_base 72: mod_base = OTHER; note = 2'-Omethyladenosine

SEQ ID NO: 9271 - RNA, 76 nt, synthetic construct; identical to SEQ ID NO: 3295
  source 1..76: mol_type = other RNA
  modified_base 1: mod_base = OTHER; note = 2'-Omethylcytosine phosphorothiorate
  modified_base 2: mod_base = OTHER; note = 2'-fluorocytosine
  modified_base 5: mod_base = OTHER; note = 2'-fluorocytosine phosphorothiorate
  modified_base 10: mod_base = OTHER; note = 2'-Omethylguanosine phosphorothiorate
  modified_base 26: mod_base = OTHER; note = 2'-Omethylguanosine
  modified_base 39: mod_base = OTHER; note = 2'-Omethyluridine
  modified_base 48: mod_base = OTHER; note = Cytosine phosphorothiorate
  modified_base 55: mod_base = OTHER; note = 2'-fluorouridine phosphorothiorate
  modified_base 66: mod_base = OTHER; note = 2'-fluorouridine
  modified_base 75: mod_base = OTHER; note = Cytosine phosphorothiorate

SEQ ID NO: 9272 - RNA, 76 nt, synthetic construct; identical to SEQ ID NO: 3675
  source 1..76: mol_type = other RNA
  modified_base 1: mod_base = OTHER; note = 2'-Omethylguanosine
  modified_base 17: mod_base = OTHER; note = 2'-Omethylguanosine
  modified_base 18: mod_base = OTHER; note = 2'-Omethylguanosine
  modified_base 50: mod_base = OTHER; note = 2'-Omethylcytosine
  modified_base 52: mod_base = OTHER; note = 2'-Omethylguanosine
  modified_base 73: mod_base = OTHER; note = 2'-Omethylguanosine

SEQ ID NO: 9273 - RNA, 85 nt, synthetic construct; identical to SEQ ID NO: 3286
  source 1..85: mol_type = other RNA
  modified_base 1: mod_base = OTHER; note = 2'-Omethylcytosine phosphorothiorate
  modified_base 2: mod_base = OTHER; note = 2'-Omethylcytosine
  modified_base 6: mod_base = OTHER; note = 2'-fluoroadenosine phosphorothiorate
  modified_base 26: mod_base = OTHER; note = 2'-fluorouridine
  modified_base 27: mod_base = OTHER; note = 2'-fluorouridine
  modified_base 28: mod_base = OTHER; note = 2'-fluoroguanosine
  modified_base 30: mod_base = OTHER; note = 2'-fluoroadenosine
  modified_base 32: mod_base = OTHER; note = 2'-fluorouridine
  modified_base 34: mod_base = OTHER; note = 2'-fluorouridine phosphorothiorate
  modified_base 35: mod_base = OTHER; note = 2'-fluoroadenosine phosphorothiorate
  modified_base 43: mod_base = OTHER; note = 2'-Omethyluridine
  modified_base 44: mod_base = OTHER; note = Guanosine phosphorothiorate
  modified_base 51: mod_base = OTHER; note = 2'-Omethyluridine
  modified_base 54: mod_base = OTHER; note = 2'-Omethylcytosine
  modified_base 56: mod_base = OTHER; note = 2'-fluoroguanosine
  modified_base 57: mod_base = OTHER; note = 2'-Omethylcytosine
  modified_base 58: mod_base = OTHER; note = 2'-Omethylguanosine
  modified_base 62: mod_base = OTHER; note = Guanosine phosphorothiorate
  modified_base 75: mod_base = OTHER; note = 2'-fluorouridine
  modified_base 76: mod_base = OTHER; note = Cytosine phosphorothiorate
  modified_base 84: mod_base = OTHER; note = Cytosine phosphorothiorate

SEQ ID NO: 9274 - RNA, 85 nt, synthetic construct; identical to SEQ ID NO: 3310
  source 1..85: mol_type = other RNA
  modified_base 1: mod_base = OTHER; note = 2'-Omethylcytosine phosphorothiorate
  modified_base 40: mod_base = OTHER; note = Cytosine phosphorothiorate
  modified_base 49: mod_base = OTHER; note = 2'-fluorouridine
  modified_base 70: mod_base = OTHER; note = 2'-fluorocytosine
  modified_base 85: mod_base = OTHER; note = 2'-fluoroadenosine

SEQ ID NO: 9275 - RNA, 76 nt, synthetic construct
  source 1..76: mol_type = other RNA
ggctccgtggcgcaatggatagcgcattcgacttcagattgaaaggttccgggttcgagtcccggcggagtcgcca

SEQ ID NO: 9276 - RNA, 76 nt, synthetic construct; identical to SEQ ID NO: 625
  source 1..76: mol_type = other RNA
  modified_base 1: mod_base = OTHER; note = 2'-Omethylguanosine phosphorothiorate
  modified_base 2: mod_base = OTHER; note = 2'-Omethylguanosine phosphorothiorate
  modified_base 5: mod_base = OTHER; note = 2'-Omethylcytosine
  modified_base 61: mod_base = OTHER; note = 2'-fluorocytosine
  modified_base 73: mod_base = OTHER; note = Guanosine phosphorothiorate
  modified_base 74: mod_base = OTHER; note = Cytosine phosphorothiorate
  modified_base 75: mod_base = OTHER; note = 2'-Omethylcytosine phosphorothiorate
  modified_base 76: mod_base = OTHER; note = 2'-Omethyladenosine

SEQ ID NO: 9277 - RNA, 75 nt, synthetic construct; identical to SEQ ID NO: 3306
  source 1..75: mol_type = other RNA
  modified_base 18: mod_base = OTHER; note = 2'-Omethylguanosine
  modified_base 72: mod_base = OTHER; note = 2'-Omethyladenosine

SEQ ID NO: 9278 - RNA, 75 nt, synthetic construct; identical to SEQ ID NO: 3306
  source 1..75: mol_type = other RNA
  modified_base 1: mod_base = OTHER; note = 2'-Omethylguanosine
  modified_base 2: mod_base = OTHER; note = 2'-Omethyladenosine
  modified_base 3: mod_base = OTHER; note = 2'-Omethylcytosine
  modified_base 4: mod_base = OTHER; note = 2'-Omethylcytosine
  modified_base 5: mod_base = OTHER; note = 2'-Omethyluridine
  modified_base 6: mod_base = OTHER; note = 2'-Omethylcytosine
  modified_base 10: mod_base = OTHER; note = 2'-Omethylguanosine
  modified_base 11: mod_base = OTHER; note = 2'-Omethylcytosine
  modified_base 12: mod_base = OTHER; note = 2'-Omethylguanosine
  modified_base 13: mod_base = OTHER; note = 2'-Omethylcytosine
  modified_base 14: mod_base = OTHER; note = 2'-Omethyladenosine
  modified_base 15: mod_base = OTHER; note = 2'-fluoroadenosine
  modified_base 16: mod_base = OTHER; note = 2'-Omethylcytosine
  modified_base 17: mod_base = OTHER; note = 2'-Omethylguanosine
  modified_base 18: mod_base = OTHER; note = 2'-Omethylguanosine
  modified_base 19: mod_base = OTHER; note = 2'-fluorouridine
  modified_base 24: mod_base = OTHER; note = 2'-Omethylcytosine
  modified_base 32: mod_base = OTHER; note = 2'-fluorouridine
  modified_base 34: mod_base = OTHER; note = Uridine phosphorothiorate
  modified_base 36: mod_base = OTHER; note = Guanosine phosphorothiorate
  modified_base 37: mod_base = OTHER; note = Adenosine phosphorothiorate
  modified_base 40: mod_base = OTHER; note = 2'-Omethyladenosine
  modified_base 41: mod_base = OTHER; note = 2'-Omethylguanosine
  modified_base 42: mod_base = OTHER; note = 2'-Omethyladenosine
  modified_base 43: mod_base = OTHER; note = 2'-Omethyladenosine
  modified_base 48: mod_base = OTHER; note = 2'-Omethylguanosine
  modified_base 49: mod_base = OTHER; note = 2'-Omethylcytosine
  modified_base 51: mod_base = OTHER; note = 2'-Omethyluridine
  modified_base 53: mod_base = OTHER; note = 2'-Omethyluridine
  modified_base 54: mod_base = OTHER; note = Uridine phosphorothiorate
  modified_base 55: mod_base = OTHER; note = 2'-Omethylcytosine
  modified_base 56: mod_base = OTHER; note = 2'-fluoroadenosine
  modified_base 58: mod_base = OTHER; note = 2'-Omethyladenosine
  modified_base 60: mod_base = OTHER; note = 2'-Omethylcytosine
  modified_base 64: mod_base = OTHER; note = 2'-Omethyluridine
  modified_base 72: mod_base = OTHER; note = 2'-Omethyladenosine

SEQ ID NO: 9279 - RNA, 76 nt, synthetic construct; identical to SEQ ID NO: 625
  source 1..76: mol_type = other RNA
  modified_base 22: mod_base = OTHER; note = 2'-O-(2-Methoxyethyl) guanosine
  modified_base 23: mod_base = OTHER; note = 2'-O-(2-Methoxyethyl) cytosine
  modified_base 24: mod_base = OTHER; note = 2'-O-(2-Methoxyethyl) guanosine
  modified_base 25: mod_base = OTHER; note = 2'-O-(2-Methoxyethyl) cytosine

SEQ ID NO: 9280 - RNA, 76 nt, synthetic construct; identical to SEQ ID NO: 625
  source 1..76: mol_type = other RNA
  modified_base 1: mod_base = OTHER; note = 2'-Omethylguanosine
  modified_base 2: mod_base = OTHER; note = 2'-fluoroguanosine
  modified_base 10: mod_base = OTHER; note = 2'-Omethylguanosine
  modified_base 13: mod_base = OTHER; note = 2'-Omethylcytosine
  modified_base 17: mod_base = OTHER; note = Guanosine phosphorothiorate
  modified_base 18: mod_base = OTHER; note = 2'-Omethylguanosine
  modified_base 19: mod_base = OTHER; note = Adenosine phosphorothiorate
  modified_base 20: mod_base = OTHER; note = 2'-Omethyluridine
  modified_base 25: mod_base = OTHER; note = 2'-Omethylcytosine
  modified_base 29: mod_base = OTHER; note = 2'-Omethylguanosine
  modified_base 33: mod_base = OTHER; note = 2'-fluorouridine
  modified_base 35: mod_base = OTHER; note = Cytosine phosphorothiorate
  modified_base 37: mod_base = OTHER; note = Adenosine phosphorothiorate
  modified_base 38: mod_base = OTHER; note = Adenosine phosphorothiorate
  modified_base 41: mod_base = OTHER; note = 2'-fluorocytosine
  modified_base 43: mod_base = OTHER; note = 2'-Omethyladenosine
  modified_base 44: mod_base = OTHER; note = 2'-fluoroadenosine
  modified_base 46: mod_base = OTHER; note = Guanosine phosphorothiorate
  modified_base 50: mod_base = OTHER; note = 2'-Omethylcytosine
  modified_base 52: mod_base = OTHER; note = 2'-Omethylguanosine
  modified_base 54: mod_base = OTHER; note = Uridine phosphorothiorate
  modified_base 55: mod_base = OTHER; note = Uridine phosphorothiorate
  modified_base 56: mod_base = OTHER; note = 2'-Omethylcytosine
  modified_base 57: mod_base = OTHER; note = Guanosine phosphorothiorate
  modified_base 62: mod_base = OTHER; note = 2'-Omethylcytosine
  modified_base 63: mod_base = OTHER; note = 2'-fluorocytosine
  modified_base 65: mod_base = OTHER; note = 2'-Omethylguanosine
  modified_base 71: mod_base = OTHER; note = 2'-Omethyluridine
  modified_base 73: mod_base = OTHER; note = 2'-Omethylguanosine

SEQ ID NO: 9281 - RNA, 75 nt, synthetic construct; identical to SEQ ID NO: 3311
  source 1..75: mol_type = other RNA
  modified_base 1: mod_base = OTHER; note = 2'-Omethylguanosine
  modified_base 2: mod_base = OTHER; note = 2'-Omethylguanosine phosphorothiorate
  modified_base 20: mod_base = OTHER; note = Adenosine phosphorothiorate
  modified_base 21: mod_base = OTHER; note = 2'-fluoroadenosine
  modified_base 40: mod_base = OTHER; note = Cytosine phosphorothiorate
  modified_base 41: mod_base = OTHER; note = 2'-fluorocytosine
  modified_base 52: mod_base = OTHER; note = Guanosine phosphorothiorate
  modified_base 55: mod_base = OTHER; note = 2'-Omethylcytosine
  modified_base 63: mod_base = OTHER; note = Guanosine phosphorothiorate
  modified_base 73: mod_base = OTHER; note = Cytosine phosphorothiorate
  modified_base 74: mod_base = OTHER; note = 2'-Omethylcytosine

SEQ ID NO: 9282 - RNA, 85 nt, synthetic construct; identical to SEQ ID NO: 3288
  source 1..85: mol_type = other RNA
  modified_base 1: mod_base = OTHER; note = 2'-fluorocytosine phosphorothiorate
  modified_base 23: mod_base = OTHER; note = 2'-fluoroguanosine
  modified_base 33: mod_base = OTHER; note = Uridine phosphorothiorate
  modified_base 41: mod_base = OTHER; note = Adenosine phosphorothiorate
  modified_base 47: mod_base = OTHER; note = Cytosine phosphorothiorate
  modified_base 64: mod_base = OTHER; note = Uridine phosphorothiorate

SEQ ID NO: 9283 - RNA, 85 nt, synthetic construct; identical to SEQ ID NO: 3286
  source 1..85: mol_type = other RNA
  modified_base 1: mod_base = OTHER; note = 2'-Omethylcytosine
  modified_base 30: mod_base = OTHER; note = 2'-fluoroadenosine
  modified_base 34: mod_base = OTHER; note = 2'-fluorouridine
  modified_base 42: mod_base = OTHER; note = Adenosine phosphorothiorate
  modified_base 55: mod_base = OTHER; note = Cytosine phosphorothiorate
  modified_base 58: mod_base = OTHER; note = 2'-fluoroguanosine
  modified_base 59: mod_base = OTHER; note = 2'-Omethyluridine
  modified_base 67: mod_base = OTHER; note = 2'-Omethyladenosine
  modified_base 83: mod_base = OTHER; note = Cytosine phosphorothiorate
  modified_base 84: mod_base = OTHER; note = 2'-Omethylcytosine

SEQ ID NO: 9284 - RNA, 85 nt, synthetic construct; identical to SEQ ID NO: 3310
  source 1..85: mol_type = other RNA
  modified_base 1: mod_base = OTHER; note = 2'-Omethylcytosine
  modified_base 11: mod_base = OTHER; note = Cytosine phosphorothiorate
  modified_base 25: mod_base = OTHER; note = 2'-fluoroguanosine
  modified_base 30: mod_base = OTHER; note = 2'-fluoroadenosine
  modified_base 34: mod_base = OTHER; note = 2'-fluorouridine
  modified_base 51: mod_base = OTHER; note = 2'-Omethyluridine
  modified_base 54: mod_base = OTHER; note = Cytosine phosphorothiorate
  modified_base 57: mod_base = OTHER; note = 2'-Omethylcytosine
  modified_base 60: mod_base = OTHER; note = Guanosine phosphorothiorate
  modified_base 68: mod_base = OTHER; note = Adenosine phosphorothiorate
  modified_base 84: mod_base = OTHER; note = Cytosine phosphorothiorate

SEQ ID NO: 9285 - RNA, 76 nt, synthetic construct; identical to SEQ ID NO: 625
  source 1..76: mol_type = other RNA
  modified_base 1: mod_base = OTHER; note = 2'-Omethylguanosine phosphorothiorate
  modified_base 2: mod_base = OTHER; note = 2'-Omethylguanosine phosphorothiorate
  modified_base 3: mod_base = OTHER; note = 2'-Omethylcytosine
  modified_base 4: mod_base = OTHER; note = 2'-Omethyluridine
  modified_base 5: mod_base = OTHER; note = 2'-Omethylcytosine
  modified_base 6: mod_base = OTHER; note = 2'-Omethylcytosine
  modified_base 10: mod_base = OTHER; note = 2'-Omethylguanosine
  modified_base 11: mod_base = OTHER; note = 2'-Omethylcytosine
  modified_base 12: mod_base = OTHER; note = 2'-Omethylguanosine
  modified_base 13: mod_base = OTHER; note = 2'-Omethylcytosine
  modified_base 16: mod_base = OTHER; note = 2'-Omethyluridine
  modified_base 17: mod_base = OTHER; note = 2'-Omethylguanosine
  modified_base 18: mod_base = OTHER; note = 2'-Omethylguanosine
  modified_base 20: mod_base = OTHER; note = 2'-Omethyluridine
  modified_base 22: mod_base = OTHER; note = 2'-Omethylguanosine
  modified_base 23: mod_base = OTHER; note = 2'-Omethylcytosine
  modified_base 24: mod_base = OTHER; note = 2'-Omethylguanosine
  modified_base 25: mod_base = OTHER; note = 2'-Omethylcytosine
  modified_base 33: mod_base = OTHER; note = 2'-fluorouridine
  modified_base 35: mod_base = OTHER; note = Cytosine phosphorothiorate
  modified_base 37: mod_base = OTHER; note = Adenosine phosphorothiorate
  modified_base 38: mod_base = OTHER; note = Adenosine phosphorothiorate
  modified_base 41: mod_base = OTHER; note = 2'-fluorocytosine
  modified_base 42: mod_base = OTHER; note = 2'-Omethyladenosine
  modified_base 43: mod_base = OTHER; note = 2'-Omethyladenosine
  modified_base 44: mod_base = OTHER; note = 2'-fluoroadenosine
  modified_base 49: mod_base = OTHER; note = 2'-Omethylcytosine
  modified_base 50: mod_base = OTHER; note = 2'-Omethylcytosine
  modified_base 52: mod_base = OTHER; note = 2'-Omethylguanosine
  modified_base 54: mod_base = OTHER; note = 2'-Omethyluridine
  modified_base 55: mod_base = OTHER; note = Uridine phosphorothiorate
  modified_base 56: mod_base = OTHER; note = 2'-Omethylcytosine
  modified_base 57: mod_base = OTHER; note = 2'-fluoroguanosine
  modified_base 59: mod_base = OTHER; note = 2'-Omethylguanosine
  modified_base 61: mod_base = OTHER; note = 2'-Omethylcytosine
  modified_base 65: mod_base = OTHER; note = 2'-Omethylguanosine
  modified_base 73: mod_base = OTHER; note = 2'-Omethylguanosine

SEQ ID NO: 9286 - RNA, 75 nt, synthetic construct; identical to SEQ ID NO: 3306
  source 1..75: mol_type = other RNA
  modified_base 1: mod_base = OTHER; note = 2'-Omethylguanosine
  modified_base 2: mod_base = OTHER; note = 2'-Omethyladenosine
  modified_base 3: mod_base = OTHER; note = 2'-Omethylcytosine
  modified_base 4: mod_base = OTHER; note = 2'-Omethylcytosine
  modified_base 5: mod_base = OTHER; note = 2'-Omethyluridine
  modified_base 6: mod_base = OTHER; note = 2'-Omethylcytosine
  modified_base 10: mod_base = OTHER; note = 2'-Omethylguanosine
  modified_base 11: mod_base = OTHER; note = 2'-Omethylcytosine
  modified_base 12: mod_base = OTHER; note = 2'-Omethylguanosine
  modified_base 13: mod_base = OTHER; note = 2'-Omethylcytosine
  modified_base 21: mod_base = OTHER; note = 2'-Omethylguanosine
  modified_base 22: mod_base = OTHER; note = 2'-Omethylcytosine
  modified_base 23: mod_base = OTHER; note = 2'-Omethylguanosine
  modified_base 24: mod_base = OTHER; note = 2'-Omethylcytosine
  modified_base 48: mod_base = OTHER; note = 2'-Omethylguanosine
  modified_base 49: mod_base = OTHER; note = 2'-Omethylcytosine
  modified_base 50: mod_base = OTHER; note = 2'-Omethylguanosine
  modified_base 51: mod_base = OTHER; note = 2'-Omethyluridine
  modified_base 52: mod_base = OTHER; note = 2'-Omethylguanosine
  modified_base 72: mod_base = OTHER; note = 2'-Omethyladenosine

SEQ ID NO: 9287 - RNA, 85 nt, synthetic construct; identical to SEQ ID NO: 3297
  source 1..85: mol_type = other RNA
  modified_base 58: mod_base = OTHER; note = 2'-Omethylguanosine
  modified_base 61: mod_base = OTHER; note = 2'-Omethylguanosine

SEQ ID NO: 9288 - RNA, 85 nt, synthetic construct; identical to SEQ ID NO: 3317
  source 1..85: mol_type = other RNA
  modified_base 1: mod_base = OTHER; note = 2'-Omethylguanosine phosphorothiorate
  modified_base 2: mod_base = OTHER; note = Cytosine phosphorothiorate
  modified_base 3: mod_base = OTHER; note = Uridine phosphorothiorate
  modified_base 4: mod_base = OTHER; note = 2'-Omethylguanosine phosphorothiorate
  modified_base 11: mod_base = OTHER; note = 2'-fluorocytosine
  modified_base 12: mod_base = OTHER; note = 2'-Omethylcytosine phosphorothiorate
  modified_base 14: mod_base = OTHER; note = 2'-Omethyladenosine
  modified_base 15: mod_base = OTHER; note = 2'-fluoroguanosine
  modified_base 33: mod_base = OTHER; note = 2'-fluorouridine
  modified_base 34: mod_base = OTHER; note = 2'-fluorocytosine
  modified_base 44: mod_base = OTHER; note = 2'-Omethyluridine
  modified_base 46: mod_base = OTHER; note = 2'-Omethylguanosine
  modified_base 56: mod_base = OTHER; note = 2'-fluoroguanosine phosphorothiorate
  modified_base 58: mod_base = OTHER; note = Guanosine phosphorothiorate
  modified_base 60: mod_base = OTHER; note = 2'-Omethyladenosine
  modified_base 64: mod_base = OTHER; note = 2'-fluorouridine
  modified_base 69: mod_base = OTHER; note = 2'-fluorouridine
  modified_base 73: mod_base = OTHER; note = 2'-fluoroguanosine phosphorothiorate
  modified_base 80: mod_base = OTHER; note = 2'-fluoroguanosine
  modified_base 82: mod_base = OTHER; note = 2'-Omethylguanosine

SEQ ID NO: 9289 - RNA, 85 nt, synthetic construct; identical to SEQ ID NO: 3317
  source 1..85: mol_type = other RNA
  modified_base 1: mod_base = OTHER; note = 2'-Omethylguanosine phosphorothiorate
  modified_base 2: mod_base = OTHER; note = 2'-Omethylcytosine phosphorothiorate
  modified_base 5: mod_base = OTHER; note = 2'-Omethyluridine
  modified_base 20: mod_base = OTHER; note = 2'-Omethyluridine
  modified_base 27: mod_base = OTHER; note = 2'-fluorouridine phosphorothiorate
  modified_base 33: mod_base = OTHER; note = 2'-fluorouridine
  modified_base 44: mod_base = OTHER; note = Uridine phosphorothiorate
  modified_base 50: mod_base = OTHER; note = 2'-Omethylcytosine
  modified_base 59: mod_base = OTHER; note = 2'-fluorocytosine
  modified_base 83: mod_base = OTHER; note = 2'-Omethylcytosine phosphorothiorate

SEQ ID NO: 9290 - RNA, 76 nt, synthetic construct; identical to SEQ ID NO: 625
  source 1..76: mol_type = other RNA
  modified_base 27: mod_base = OTHER; note = Thymine
  modified_base 28: mod_base = OTHER; note = Thymine
  modified_base 33: mod_base = OTHER; note = Thymine
  modified_base 34: mod_base = OTHER; note = Thymine
  modified_base 39: mod_base = OTHER; note = Thymine
  modified_base 40: mod_base = OTHER; note = Thymine

SEQ ID NO: 9291 - RNA, 76 nt, synthetic construct; identical to SEQ ID NO: 625
  source 1..76: mol_type = other RNA
  modified_base 2: mod_base = OTHER; note = 2'-Omethylguanosine
  modified_base 5: mod_base = OTHER; note = 2'-fluorocytosine phosphorothiorate
  modified_base 6: mod_base = OTHER; note = 2'-fluorocytosine
  modified_base 10: mod_base = OTHER; note = 2'-fluoroguanosine
  modified_base 11: mod_base = OTHER; note = 2'-Omethylcytosine
  modified_base 17: mod_base = OTHER; note = Guanosine phosphorothiorate
  modified_base 18: mod_base = OTHER; note = 2'-fluoroguanosine
  modified_base 23: mod_base = OTHER; note = 2'-fluorocytosine
  modified_base 24: mod_base = OTHER; note = 2'-Omethylguanosine
  modified_base 25: mod_base = OTHER; note = 2'-fluorocytosine
  modified_base 33: mod_base = OTHER; note = 2'-fluorouridine
  modified_base 34: mod_base = OTHER; note = Uridine phosphorothiorate
  modified_base 39: mod_base = OTHER; note = 2'-fluorouridine phosphorothiorate
  modified_base 40: mod_base = OTHER; note = 2'-fluorouridine
  modified_base 42: mod_base = OTHER; note = 2'-fluoroadenosine
  modified_base 43: mod_base = OTHER; note = 2'-Omethyladenosine
  modified_base 45: mod_base = OTHER; note = Guanosine phosphorothiorate
  modified_base 46: mod_base = OTHER; note = 2'-fluoroguanosine
  modified_base 47: mod_base = OTHER; note = Uridine phosphorothiorate
  modified_base 49: mod_base = OTHER; note = 2'-fluorocytosine
  modified_base 52: mod_base = OTHER; note = Guanosine phosphorothiorate
  modified_base 53: mod_base = OTHER; note = 2'-Omethylguanosine
  modified_base 57: mod_base = OTHER; note = 2'-Omethylguanosine
  modified_base 60: mod_base = OTHER; note = 2'-Omethyluridine
  modified_base 61: mod_base = OTHER; note = 2'-Omethylcytosine
  modified_base 62: mod_base = OTHER; note = 2'-fluorocytosine
  modified_base 63: mod_base = OTHER; note = 2'-fluorocytosine
  modified_base 65: mod_base = OTHER; note = 2'-fluoroguanosine
  modified_base 66: mod_base = OTHER; note = 2'-fluorocytosine phosphorothiorate
  modified_base 68: mod_base = OTHER; note = Guanosine phosphorothiorate
  modified_base 69: mod_base = OTHER; note = 2'-fluoroadenosine
  modified_base 70: mod_base = OTHER; note = 2'-Omethylguanosine phosphorothiorate
  modified_base 74: mod_base = OTHER; note = 2'-Omethylcytosine phosphorothiorate

SEQ ID NO: 9292 - RNA, 76 nt, synthetic construct; identical to SEQ ID NO: 625
  source 1..76: mol_type = other RNA
  modified_base 2: mod_base = OTHER; note = Guanosine phosphorothiorate
  modified_base 3: mod_base = OTHER; note = 2'-Omethylcytosine
  modified_base 5: mod_base = OTHER; note = 2'-Omethylcytosine
  modified_base 6: mod_base = OTHER; note = Cytosine phosphorothiorate
  modified_base 7: mod_base = OTHER; note = Guanosine phosphorothiorate
  modified_base 10: mod_base = OTHER; note = Guanosine phosphorothiorate
  modified_base 11: mod_base = OTHER; note = 2'-fluorocytosine phosphorothiorate
  modified_base 16: mod_base = OTHER; note = 2'-Omethyluridine
  modified_base 22: mod_base = OTHER; note = 2'-Omethylguanosine
  modified_base 23: mod_base = OTHER; note = Cytosine phosphorothiorate
  modified_base 28: mod_base = OTHER; note = 2'-fluorouridine
  modified_base 29: mod_base = OTHER; note = Guanosine phosphorothiorate
  modified_base 30: mod_base = OTHER; note = 2'-Omethylguanosine phosphorothiorate
  modified_base 33: mod_base = OTHER; note = 2'-fluorouridine
  modified_base 38: mod_base = OTHER; note = 2'-Omethyladenosine
  modified_base 41: mod_base = OTHER; note = 2'-fluorocytosine
  modified_base 44: mod_base = OTHER; note = 2'-Omethyladenosine
  modified_base 48: mod_base = OTHER; note = 2'-fluorouridine
  modified_base 52: mod_base = OTHER; note = 2'-Omethylguanosine
  modified_base 54: mod_base = OTHER; note = 2'-Omethyluridine
  modified_base 56: mod_base = OTHER; note = 2'-fluorocytosine
  modified_base 57: mod_base = OTHER; note = 2'-fluoroguanosine
  modified_base 58: mod_base = OTHER; note = 2'-fluoroadenosine
  modified_base 59: mod_base = OTHER; note = 2'-Omethylguanosine
  modified_base 61: mod_base = OTHER; note = 2'-fluorocytosine
  modified_base 62: mod_base = OTHER; note = Cytosine phosphorothiorate
  modified_base 63: mod_base = OTHER; note = 2'-fluorocytosine
  modified_base 64: mod_base = OTHER; note = 2'-Omethylguanosine
  modified_base 65: mod_base = OTHER; note = Guanosine phosphorothiorate
  modified_base 66: mod_base = OTHER; note = 2'-fluorocytosine
  modified_base 67: mod_base = OTHER; note = 2'-fluoroguanosine
  modified_base 72: mod_base = OTHER; note = Cytosine phosphorothiorate
  modified_base 73: mod_base = OTHER; note = 2'-fluoroguanosine phosphorothiorate
  modified_base 75: mod_base = OTHER; note = 2'-fluorocytosine

SEQ ID NO: 9293 - RNA, 86 nt, synthetic construct; identical to SEQ ID NO: 3290
  source 1..86: mol_type = other RNA
  modified_base 42: mod_base = OTHER; note = Adenosine phosphorothiorate

SEQ ID NO: 9294 - RNA, 76 nt, synthetic construct
  source 1..76: mol_type = other RNA
ggctgcgtggcgcaatggagagcgcattggacttcaaattcaaaggttccgggttcgagtcccggcgcagtcgcca

SEQ ID NO: 9295 - RNA, 76 nt, synthetic construct; identical to SEQ ID NO: 625
  source 1..76: mol_type = other RNA
  modified_base 20: mod_base = OTHER; note = Thymine

SEQ ID NO: 9296 - RNA, 74 nt, synthetic construct; identical to SEQ ID NO: 766
  source 1..74: mol_type = other RNA
  modified_base 1: mod_base = OTHER; note = 2'-Omethylguanosine
  modified_base 14: mod_base = OTHER; note = 2'-Omethyladenosine
  modified_base 15: mod_base = OTHER; note = 2'-fluoroadenosine
  modified_base 16: mod_base = OTHER; note = 2'-Omethyluridine
  modified_base 17: mod_base = OTHER; note = 2'-Omethylguanosine
  modified_base 18: mod_base = OTHER; note = 2'-Omethylguanosine
  modified_base 20: mod_base = OTHER; note = 2'-Omethyluridine
  modified_base 73: mod_base = OTHER; note = 2'-Omethylguanosine phosphorothiorate

SEQ ID NO: 9297 - RNA, 76 nt, synthetic construct; identical to SEQ ID NO: 3295
  source 1..76: mol_type = other RNA
  modified_base 1: mod_base = OTHER; note = 2'-Omethylcytosine
  modified_base 2: mod_base = OTHER; note = 2'-Omethylcytosine phosphorothiorate
  modified_base 5: mod_base = OTHER; note = 2'-fluorocytosine phosphorothiorate
  modified_base 14: mod_base = OTHER; note = 2'-fluoroadenosine phosphorothiorate
  modified_base 20: mod_base = OTHER; note = 2'-Omethyluridine
  modified_base 38: mod_base = OTHER; note = 2'-fluoroadenosine phosphorothiorate
  modified_base 45: mod_base = OTHER; note = 2'-Omethylguanosine phosphorothiorate
  modified_base 52: mod_base = OTHER; note = 2'-Omethylguanosine
  modified_base 76: mod_base = OTHER; note = 2'-Omethyladenosine

SEQ ID NO: 9298 - RNA, 85 nt, synthetic construct; identical to SEQ ID NO: 3297
  source 1..85: mol_type = other RNA
  modified_base 1: mod_base = OTHER; note = 2'-Omethylguanosine
  modified_base 14: mod_base = OTHER; note = 2'-Omethyladenosine
  modified_base 15: mod_base = OTHER; note = 2'-fluoroguanosine
  modified_base 16: mod_base = OTHER; note = 2'-Omethyluridine
  modified_base 17: mod_base = OTHER; note = 2'-Omethylguanosine
  modified_base 18: mod_base = OTHER; note = 2'-Omethylguanosine
  modified_base 19: mod_base = OTHER; note = 2'-fluorouridine
  modified_base 20: mod_base = OTHER; note = 2'-Omethyluridine
  modified_base 63: mod_base = OTHER; note = 2'-Omethyluridine phosphorothiorate
  modified_base 64: mod_base = OTHER; note = Uridine phosphorothiorate
  modified_base 65: mod_base = OTHER; note = 2'-Omethylcytosine
  modified_base 66: mod_base = OTHER; note = 2'-Omethylguanosine
  modified_base 68: mod_base = OTHER; note = 2'-Omethyladenosine
  modified_base 82: mod_base = OTHER; note = 2'-Omethylguanosine

SEQ ID NO: 9299 - DNA, 76 bp, synthetic construct; identical to SEQ ID NO: 1924
  source 1..76: mol_type = other DNA
  misc_feature 1..48: note = RNA
  misc_feature 49..53: note = DNA
  misc_feature 54..60: note = RNA
  misc_feature 61..65: note = DNA
  misc_feature 66..76: note = RNA

SEQ ID NO: 9300 - RNA, 76 nt, synthetic construct
  source 1..76: mol_type = other RNA
gcctccgtggcctaatggataaggcatcggtcttcaaaaccggggattgtgggttcgagtcccaccggaggtgcca

SEQ ID NO: 9301 - RNA, 75 nt, synthetic construct; identical to SEQ ID NO: 1045
  source 1..75: mol_type = other RNA
  modified_base 1: mod_base = OTHER; note = 2'-Omethylguanosine phosphorothiorate
  modified_base 2: mod_base = OTHER; note = 2'-fluoroguanosine phosphorothiorate
  modified_base 21: mod_base = OTHER; note = Adenosine phosphorothiorate
  modified_base 22: mod_base = OTHER; note = 2'-fluoroguanosine
  modified_base 25: mod_base = OTHER; note = 2'-fluorocytosine
  modified_base 30: mod_base = OTHER; note = 2'-Omethylguanosine
  modified_base 36: mod_base = OTHER; note = 2'-fluoroadenosine
  modified_base 41: mod_base = OTHER; note = 2'-fluorocytosine phosphorothiorate
  modified_base 51: mod_base = OTHER; note = 2'-Omethyladenosine
  modified_base 59: mod_base = OTHER; note = 2'-Omethyluridine
  modified_base 61: mod_base = OTHER; note = 2'-fluorouridine
  modified_base 62: mod_base = OTHER; note = Cytosine phosphorothiorate
  modified_base 64: mod_base = OTHER; note = 2'-fluoroguanosine
  modified_base 65: mod_base = OTHER; note = Uridine phosphorothiorate
  modified_base 67: mod_base = OTHER; note = Guanosine phosphorothiorate
  modified_base 68: mod_base = OTHER; note = 2'-fluoroadenosine
  modified_base 70: mod_base = OTHER; note = Cytosine phosphorothiorate
  modified_base 73: mod_base = OTHER; note = Cytosine phosphorothiorate
  modified_base 75: mod_base = OTHER; note = 2'-fluoroadenosine

SEQ ID NO: 9302 - RNA, 76 nt, synthetic construct; identical to SEQ ID NO: 625
  source 1..76: mol_type = other RNA
  modified_base 1: mod_base = OTHER; note = 2'-Omethylguanosine
  modified_base 13: mod_base = OTHER; note = 2'-Omethylcytosine
  modified_base 17: mod_base = OTHER; note = Guanosine phosphorothiorate
  modified_base 18: mod_base = OTHER; note = 2'-Omethylguanosine
  modified_base 19: mod_base = OTHER; note = Adenosine phosphorothiorate
  modified_base 20: mod_base = OTHER; note = 2'-Omethyluridine
  modified_base 25: mod_base = OTHER; note = 2'-Omethylcytosine
  modified_base 29: mod_base = OTHER; note = 2'-Omethylguanosine
  modified_base 33: mod_base = OTHER; note = 2'-fluorouridine
  modified_base 35: mod_base = OTHER; note = Cytosine phosphorothiorate
  modified_base 37: mod_base = OTHER; note = Adenosine phosphorothiorate
  modified_base 38: mod_base = OTHER; note = Adenosine phosphorothiorate
  modified_base 41: mod_base = OTHER; note = 2'-fluorocytosine phosphorothiorate
  modified_base 43: mod_base = OTHER; note = 2'-Omethyladenosine
  modified_base 44: mod_base = OTHER; note = 2'-fluoroadenosine
  modified_base 46: mod_base = OTHER; note = Guanosine phosphorothiorate
  modified_base 50: mod_base = OTHER; note = 2'-Omethylcytosine
  modified_base 52: mod_base = OTHER; note = 2'-Omethylguanosine
  modified_base 54: mod_base = OTHER; note = Uridine phosphorothiorate
  modified_base 55: mod_base = OTHER; note = Uridine phosphorothiorate
  modified_base 56: mod_base = OTHER; note = 2'-Omethylcytosine
  modified_base 62: mod_base = OTHER; note = 2'-Omethylcytosine
  modified_base 63: mod_base = OTHER; note = 2'-fluorocytosine
  modified_base 65: mod_base = OTHER; note = 2'-Omethylguanosine
  modified_base 71: mod_base = OTHER; note = 2'-Omethyluridine
  modified_base 73: mod_base = OTHER; note = 2'-Omethylguanosine

SEQ ID NO: 9303 - RNA, 85 nt, synthetic construct; identical to SEQ ID NO: 3286
  source 1..85: mol_type = other RNA
  modified_base 1: mod_base = OTHER; note = 2'-Omethylcytosine
  modified_base 13: mod_base = OTHER; note = Adenosine phosphorothiorate
  modified_base 25: mod_base = OTHER; note = Guanosine phosphorothiorate
  modified_base 26: mod_base = OTHER; note = 2'-fluorouridine phosphorothiorate
  modified_base 27: mod_base = OTHER; note = 2'-fluorouridine
  modified_base 30: mod_base = OTHER; note = 2'-fluoroadenosine
  modified_base 33: mod_base = OTHER; note = 2'-fluorouridine phosphorothiorate
  modified_base 34: mod_base = OTHER; note = Uridine phosphorothiorate
  modified_base 39: mod_base = OTHER; note = Cytosine phosphorothiorate
  modified_base 43: mod_base = OTHER; note = 2'-Omethyluridine
  modified_base 45: mod_base = OTHER; note = 2'-fluoroguanosine
  modified_base 46: mod_base = OTHER; note = 2'-Omethyladenosine
  modified_base 54: mod_base = OTHER; note = 2'-Omethylcytosine
  modified_base 55: mod_base = OTHER; note = 2'-Omethylcytosine
  modified_base 56: mod_base = OTHER; note = 2'-fluoroguanosine
  modified_base 57: mod_base = OTHER; note = 2'-Omethylcytosine
  modified_base 58: mod_base = OTHER; note = 2'-Omethylguanosine
  modified_base 60: mod_base = OTHER; note = 2'-fluoroguanosine phosphorothiorate
  modified_base 67: mod_base = OTHER; note = 2'-fluoroadenosine phosphorothiorate
  modified_base 71: mod_base = OTHER; note = 2'-fluorocytosine phosphorothiorate
  modified_base 75: mod_base = OTHER; note = 2'-fluorouridine
  modified_base 84: mod_base = OTHER; note = Cytosine phosphorothiorate

SEQ ID NO: 9304 - DNA, 76 bp, synthetic construct; identical to SEQ ID NO: 1924
  source 1..76: mol_type = other DNA
  modified_base 1: mod_base = OTHER; note = 2'-Omethylguanosine phosphorothiorate
  modified_base 2: mod_base = OTHER; note = 2'-Omethylguanosine phosphorothiorate
  modified_base 6: mod_base = OTHER; note = 2'-fluorocytosine
  modified_base 7: mod_base = OTHER; note = 2'-fluoroguanosine
  modified_base 9: mod_base = OTHER; note = Guanosine phosphorothiorate
  modified_base 11: mod_base = OTHER; note = Cytosine phosphorothiorate
  modified_base 12: mod_base = OTHER; note = 2'-O-(2-Methoxyethyl) guanosine phosphorothiorate
  modified_base 13: mod_base = OTHER; note = 2'-O-(2-Methoxyethyl) 5-methylcytosine phosphorothiorate
  modified_base 14: mod_base = OTHER; note = 2'-Omethyladenosine
  modified_base 15: mod_base = OTHER; note = 2'-fluoroadenosine
  modified_base 18: mod_base = OTHER; note = Guanosine phosphorothiorate
  modified_base 20: mod_base = OTHER; note = 2'-Omethyluridine
  modified_base 22: mod_base = OTHER; note = 2'-Omethylguanosine
  modified_base 23: mod_base = OTHER; note = 2'-fluorocytosine phosphorothiorate
  modified_base 24: mod_base = OTHER; note = 2'-Omethylguanosine
  modified_base 26: mod_base = OTHER; note = Adenosine phosphorothiorate
  modified_base 32: mod_base = OTHER; note = Cytosine phosphorothiorate
  modified_base 33: mod_base = OTHER; note = Uridine phosphorothiorate
  modified_base 37: mod_base = OTHER; note = Adenosine phosphorothiorate
  modified_base 39: mod_base = OTHER; note = 2'-O-(2-Methoxyethyl) thymine phosphorothiorate
  modified_base 40: mod_base = OTHER; note = 2'-fluorouridine
  modified_base 45: mod_base = OTHER; note = 2'-fluoroguanosine
  modified_base 46: mod_base = OTHER; note = Guanosine phosphorothiorate
  modified_base 47: mod_base = OTHER; note = 2'-O-(2-Methoxyethyl) thymine
  modified_base 51: mod_base = OTHER; note = 2'-Omethylguanosine phosphorothiorate
  modified_base 58: mod_base = OTHER; note = Adenosine phosphorothiorate
  modified_base 62: mod_base = OTHER; note = Cytosine phosphorothiorate
  modified_base 63: mod_base = OTHER; note = 2'-Omethylcytosine phosphorothiorate
  modified_base 67: mod_base = OTHER; note = Guanosine phosphorothiorate
  modified_base 68: mod_base = OTHER; note = Guanosine phosphorothiorate
  modified_base 69: mod_base = OTHER; note = 2'-fluoroadenosine
  modified_base 74: mod_base = OTHER; note = 2'-fluorocytosine phosphorothiorate
  modified_base 75: mod_base = OTHER; note = 2'-Omethylcytosine phosphorothiorate
  modified_base 76: mod_base = OTHER; note = 2'-Omethyladenosine
  misc_feature 1..15: note = RNA
  misc_feature 16: note = DNA
  misc_feature 17..20: note = RNA
  misc_feature 21: note = DNA
  misc_feature 22..26: note = RNA
  misc_feature 27: note = DNA
  misc_feature 28..33: note = RNA
  misc_feature 34: note = DNA
  misc_feature 35..51: note = RNA
  misc_feature 52: note = DNA
  misc_feature 53..58: note = RNA
  misc_feature 59: note = DNA
  misc_feature 60..76: note = RNA

SEQ ID NO: 9305 - RNA, 75 nt, synthetic construct; identical to SEQ ID NO: 3336
  source 1..75: mol_type = other RNA
  modified_base 1: mod_base = OTHER; note = 2'-Omethylcytosine phosphorothiorate
  modified_base 2: mod_base = OTHER; note = Cytosine phosphorothiorate
  modified_base 4: mod_base = OTHER; note = 2'-Omethylguanosine phosphorothiorate
  modified_base 8: mod_base = OTHER; note = 2'-Omethyladenosine phosphorothiorate
  modified_base 9: mod_base = OTHER; note = 2'-fluoroguanosine phosphorothiorate
  modified_base 13: mod_base = OTHER; note = Adenosine phosphorothiorate
  modified_base 20: mod_base = OTHER; note = 2'-fluoroadenosine
  modified_base 21: mod_base = OTHER; note = 2'-Omethylguanosine
  modified_base 25: mod_base = OTHER; note = 2'-fluoroadenosine
  modified_base 26: mod_base = OTHER; note = 2'-fluorouridine
  modified_base 34: mod_base = OTHER; note = 2'-Omethyluridine phosphorothiorate
  modified_base 37: mod_base = OTHER; note = 2'-Omethyladenosine phosphorothiorate
  modified_base 38: mod_base = OTHER; note = 2'-fluorouridine
  modified_base 46: mod_base = OTHER; note = 2'-fluorouridine
  modified_base 47: mod_base = OTHER; note = 2'-fluorocytosine
  modified_base 53: mod_base = OTHER; note = 2'-fluorouridine
  modified_base 57: mod_base = OTHER; note = 2'-fluoroadenosine
  modified_base 62: mod_base = OTHER; note = 2'-Omethylcytosine
  modified_base 73: mod_base = OTHER; note = 2'-Omethylcytosine
  modified_base 74: mod_base = OTHER; note = Cytosine phosphorothiorate

SEQ ID NO: 9306 - RNA, 76 nt, synthetic construct; identical to SEQ ID NO: 625
  source 1..76: mol_type = other RNA
  modified_base 1: mod_base = OTHER; note = 2'-fluoroguanosine
  modified_base 5: mod_base = OTHER; note = Cytosine phosphorothiorate
  modified_base 10: mod_base = OTHER; note = 2'-Omethylguanosine
  modified_base 11: mod_base = OTHER; note = 2'-fluorocytosine
  modified_base 14: mod_base = OTHER; note = 2'-fluoroadenosine
  modified_base 15: mod_base = OTHER; note = Adenosine phosphorothiorate
  modified_base 16: mod_base = OTHER; note = 2'-Omethyluridine
  modified_base 17: mod_base = OTHER; note = 2'-Omethylguanosine
  modified_base 18: mod_base = OTHER; note = Guanosine phosphorothiorate
  modified_base 20: mod_base = OTHER; note = 2'-Omethyluridine
  modified_base 22: mod_base = OTHER; note = 2'-Omethylguanosine phosphorothiorate
  modified_base 23: mod_base = OTHER; note = 2'-Omethylcytosine
  modified_base 27: mod_base = OTHER; note = 2'-Omethyluridine
  modified_base 28: mod_base = OTHER; note = 2'-Omethyluridine
  modified_base 29: mod_base = OTHER; note = Guanosine phosphorothiorate
  modified_base 30: mod_base = OTHER; note = 2'-Omethylguanosine
  modified_base 32: mod_base = OTHER; note = 2'-fluorocytosine
  modified_base 34: mod_base = OTHER; note = 2'-Omethyluridine phosphorothiorate
  modified_base 38: mod_base = OTHER; note = 2'-fluoroadenosine
  modified_base 39: mod_base = OTHER; note = 2'-Omethyluridine phosphorothiorate
  modified_base 40: mod_base = OTHER; note = 2'-Omethyluridine
  modified_base 44: mod_base = OTHER; note = 2'-Omethyladenosine
  modified_base 45: mod_base = OTHER; note = 2'-Omethylguanosine
  modified_base 47: mod_base = OTHER; note = 2'-fluorouridine
  modified_base 48: mod_base = OTHER; note = 2'-fluorouridine
  modified_base 49: mod_base = OTHER; note = Cytosine phosphorothiorate
  modified_base 50: mod_base = OTHER; note = 2'-fluorocytosine
  modified_base 52: mod_base = OTHER; note = 2'-fluoroguanosine
  modified_base 58: mod_base = OTHER; note = 2'-fluoroadenosine phosphorothiorate
  modified_base 59: mod_base = OTHER; note = 2'-Omethylguanosine
  modified_base 63: mod_base = OTHER; note = 2'-fluorocytosine phosphorothiorate
  modified_base 64: mod_base = OTHER; note = 2'-fluoroguanosine
  modified_base 65: mod_base = OTHER; note = 2'-Omethylguanosine
  modified_base 68: mod_base = OTHER; note = 2'-Omethylguanosine
  modified_base 71: mod_base = OTHER; note = 2'-Omethyluridine
  modified_base 72: mod_base = OTHER; note = Cytosine phosphorothiorate
  modified_base 73: mod_base = OTHER; note = 2'-Omethylguanosine
  modified_base 74: mod_base = OTHER; note = 2'-Omethylcytosine

SEQ ID NO: 9307 - RNA, 76 nt, synthetic construct; identical to SEQ ID NO: 3295
  source 1..76: mol_type = other RNA
  modified_base 1: mod_base = OTHER; note = 2'-Omethylcytosine
  modified_base 2: mod_base = OTHER; note = 2'-Omethylcytosine phosphorothiorate
  modified_base 8: mod_base = OTHER; note = 2'-fluorouridine
  modified_base 10: mod_base = OTHER; note = 2'-fluoroguanosine phosphorothiorate
  modified_base 16: mod_base = OTHER; note = 2'-fluorouridine
  modified_base 36: mod_base = OTHER; note = 2'-fluoroadenosine
  modified_base 39: mod_base = OTHER; note = 2'-fluorouridine phosphorothiorate
  modified_base 43: mod_base = OTHER; note = 2'-Omethyluridine phosphorothiorate
  modified_base 76: mod_base = OTHER; note = 2'-fluoroadenosine

SEQ ID NO: 9308 - RNA, 75 nt, synthetic construct; identical to SEQ ID NO: 3311
  source 1..75: mol_type = other RNA
  modified_base 2: mod_base = OTHER; note = 2'-fluoroguanosine phosphorothiorate
  modified_base 5: mod_base = OTHER; note = 2'-fluorocytosine
  modified_base 11: mod_base = OTHER; note = 2'-fluorouridine
  modified_base 15: mod_base = OTHER; note = 2'-fluoroadenosine
  modified_base 16: mod_base = OTHER; note = 2'-fluorouridine phosphorothiorate
  modified_base 20: mod_base = OTHER; note = 2'-fluoroadenosine
  modified_base 21: mod_base = OTHER; note = Adenosine phosphorothiorate
  modified_base 31: mod_base = OTHER; note = 2'-fluoroadenosine phosphorothiorate
  modified_base 42: mod_base = OTHER; note = 2'-fluoroadenosine
  modified_base 43: mod_base = OTHER; note = 2'-Omethylguanosine phosphorothiorate
  modified_base 56: mod_base = OTHER; note = 2'-Omethylguanosine
  modified_base 62: mod_base = OTHER; note = 2'-fluorocytosine
  modified_base 63: mod_base = OTHER; note = Guanosine phosphorothiorate
  modified_base 66: mod_base = OTHER; note = Guanosine phosphorothiorate
  modified_base 73: mod_base = OTHER; note = Cytosine phosphorothiorate

SEQ ID NO: 9309 - RNA, 76 nt, synthetic construct; identical to SEQ ID NO: 3318
  source 1..76: mol_type = other RNA
  modified_base 1: mod_base = OTHER; note = 2'-Omethylcytosine
  modified_base 16: mod_base = OTHER; note = 2'-Omethyluridine
  modified_base 18: mod_base = OTHER; note = 2'-Omethylguanosine
  modified_base 19: mod_base = OTHER; note = 2'-Omethylguanosine
  modified_base 73: mod_base = OTHER; note = 2'-Omethyladenosine

SEQ ID NO: 9310 - RNA, 85 nt, synthetic construct; identical to SEQ ID NO: 3288
  source 1..85: mol_type = other RNA
  modified_base 1: mod_base = OTHER; note = 2'-Omethylcytosine phosphorothiorate
  modified_base 2: mod_base = OTHER; note = 2'-Omethylcytosine
  modified_base 22: mod_base = OTHER; note = 2'-fluoroguanosine
  modified_base 28: mod_base = OTHER; note = 2'-fluoroguanosine
  modified_base 32: mod_base = OTHER; note = 2'-fluorouridine
  modified_base 36: mod_base = OTHER; note = Guanosine phosphorothiorate
  modified_base 58: mod_base = OTHER; note = Guanosine phosphorothiorate
  modified_base 84: mod_base = OTHER; note = Cytosine phosphorothiorate

SEQ ID NO: 9311 - RNA, 76 nt, synthetic construct; identical to SEQ ID NO: 625
  source 1..76: mol_type = other RNA
  modified_base 1: mod_base = OTHER; note = 2'-Omethylguanosine
  modified_base 2: mod_base = OTHER; note = 2'-Omethylguanosine
  modified_base 3: mod_base = OTHER; note = 2'-Omethylcytosine
  modified_base 5: mod_base = OTHER; note = 2'-Omethylcytosine
  modified_base 6: mod_base = OTHER; note = 2'-Omethylcytosine
  modified_base 7: mod_base = OTHER; note = Guanosine phosphorothiorate
  modified_base 9: mod_base = OTHER; note = 2'-Omethylguanosine phosphorothiorate
  modified_base 10: mod_base = OTHER; note = 2'-Omethylguanosine
  modified_base 11: mod_base = OTHER; note = 2'-Omethylcytosine
  modified_base 12: mod_base = OTHER; note = 2'-Omethylguanosine phosphorothiorate
  modified_base 13: mod_base = OTHER; note = 2'-Omethylcytosine
  modified_base 14: mod_base = OTHER; note = 2'-Omethyladenosine
  modified_base 15: mod_base = OTHER; note = 2'-Omethyladenosine
  modified_base 16: mod_base = OTHER; note = 2'-Omethyluridine
  modified_base 17: mod_base = OTHER; note = 2'-Omethylguanosine
  modified_base 18: mod_base = OTHER; note = 2'-Omethylguanosine
  modified_base 19: mod_base = OTHER; note = 2'-Omethyladenosine
  modified_base 20: mod_base = OTHER; note = Uridine phosphorothiorate
  modified_base 21: mod_base = OTHER; note = 2'-fluoroadenosine phosphorothiorate
  modified_base 22: mod_base = OTHER; note = 2'-Omethylguanosine
  modified_base 24: mod_base = OTHER; note = 2'-Omethylguanosine
  modified_base 25: mod_base = OTHER; note = 2'-Omethylcytosine
  modified_base 26: mod_base = OTHER; note = Adenosine phosphorothiorate
  modified_base 28: mod_base = OTHER; note = 2'-Omethyluridine phosphorothiorate
  modified_base 29: mod_base = OTHER; note = 2'-fluoroguanosine phosphorothiorate
  modified_base 31: mod_base = OTHER; note = 2'-Omethyladenosine phosphorothiorate
  modified_base 32: mod_base = OTHER; note = 2'-Omethylcytosine phosphorothiorate
  modified_base 33: mod_base = OTHER; note = 2'-fluorouridine
  modified_base 35: mod_base = OTHER; note = Cytosine phosphorothiorate
  modified_base 36: mod_base = OTHER; note = 2'-Omethyladenosine phosphorothiorate
  modified_base 37: mod_base = OTHER; note = Adenosine phosphorothiorate
  modified_base 38: mod_base = OTHER; note = Adenosine phosphorothiorate
  modified_base 39: mod_base = OTHER; note = Uridine phosphorothiorate
  modified_base 40: mod_base = OTHER; note = 2'-fluorouridine
  modified_base 41: mod_base = OTHER; note = 2'-fluorocytosine
  modified_base 42: mod_base = OTHER; note = Adenosine phosphorothiorate
  modified_base 43: mod_base = OTHER; note = Adenosine phosphorothiorate
  modified_base 44: mod_base = OTHER; note = 2'-Omethyladenosine
  modified_base 48: mod_base = OTHER; note = 2'-fluorouridine
  modified_base 50: mod_base = OTHER; note = 2'-Omethylcytosine
  modified_base 51: mod_base = OTHER; note = 2'-fluoroguanosine phosphorothiorate
  modified_base 52: mod_base = OTHER; note = 2'-Omethylguanosine
  modified_base 53: mod_base = OTHER; note = 2'-fluoroguanosine
  modified_base 54: mod_base = OTHER; note = Uridine phosphorothiorate
  modified_base 55: mod_base = OTHER; note = Uridine phosphorothiorate
  modified_base 56: mod_base = OTHER; note = Cytosine phosphorothiorate
  modified_base 57: mod_base = OTHER; note = 2'-Omethylguanosine
  modified_base 59: mod_base = OTHER; note = 2'-Omethylguanosine
  modified_base 60: mod_base = OTHER; note = 2'-Omethyluridine phosphorothiorate
  modified_base 61: mod_base = OTHER; note = 2'-Omethylcytosine phosphorothiorate
  modified_base 62: mod_base = OTHER; note = 2'-Omethylcytosine
  modified_base 63: mod_base = OTHER; note = 2'-fluorocytosine
  modified_base 64: mod_base = OTHER; note = 2'-Omethylguanosine
  modified_base 65: mod_base = OTHER; note = 2'-Omethylguanosine phosphorothiorate
  modified_base 66: mod_base = OTHER; note = 2'-Omethylcytosine
  modified_base 67: mod_base = OTHER; note = 2'-fluoroguanosine
  modified_base 68: mod_base = OTHER; note = 2'-fluoroguanosine
  modified_base 69: mod_base = OTHER; note = 2'-fluoroadenosine
  modified_base 72: mod_base = OTHER; note = Cytosine phosphorothiorate
  modified_base 73: mod_base = OTHER; note = 2'-Omethylguanosine
  modified_base 74: mod_base = OTHER; note = 2'-fluorocytosine phosphorothiorate
  modified_base 75: mod_base = OTHER; note = 2'-fluorocytosine phosphorothiorate
  modified_base 76: mod_base = OTHER; note = 2'-fluoroadenosine

SEQ ID NO: 9312 - DNA, 73 bp, synthetic construct; identical to SEQ ID NO: 3380
  source 1..73: mol_type = other DNA
  modified_base 1: mod_base = OTHER; note = 2'-Omethylguanosine phosphorothiorate
  modified_base 2: mod_base = OTHER; note = 2'-Omethylguanosine phosphorothiorate
  modified_base 9: mod_base = OTHER; note = Guanosine phosphorothiorate
  modified_base 52: mod_base = OTHER; note = 2'-Omethylguanosine
  modified_base 59: mod_base = OTHER; note = 2'-O-(2-Methoxyethyl) guanosine
  modified_base 72: mod_base = OTHER; note = 2'-Omethylcytosine
  misc_feature 1..9: note = RNA
  misc_feature 10: note = DNA
  misc_feature 11..73: note = RNA

SEQ ID NO: 9313 - RNA, 76 nt, synthetic construct; identical to SEQ ID NO: 625
  source 1..76: mol_type = other RNA
  modified_base 1: mod_base = OTHER; note = 2'-fluoroguanosine
  modified_base 2: mod_base = OTHER; note = 2'-fluoroguanosine
  modified_base 3: mod_base = OTHER; note = Cytosine phosphorothiorate
  modified_base 4: mod_base = OTHER; note = 2'-Omethyluridine
  modified_base 7: mod_base = OTHER; note = Guanosine phosphorothiorate
  modified_base 8: mod_base = OTHER; note = Uridine phosphorothiorate
  modified_base 9: mod_base = OTHER; note = Guanosine phosphorothiorate
  modified_base 10: mod_base = OTHER; note = 2'-Omethylguanosine
  modified_base 17: mod_base = OTHER; note = 2'-Omethylguanosine phosphorothiorate
  modified_base 18: mod_base = OTHER; note = 2'-Omethylguanosine phosphorothiorate
  modified_base 23: mod_base = OTHER; note = Cytosine phosphorothiorate
  modified_base 24: mod_base = OTHER; note = 2'-fluoroguanosine
  modified_base 28: mod_base = OTHER; note = Uridine phosphorothiorate
  modified_base 29: mod_base = OTHER; note = 2'-Omethylguanosine phosphorothiorate
  modified_base 30: mod_base = OTHER; note = 2'-Omethylguanosine
  modified_base 31: mod_base = OTHER; note = 2'-Omethyladenosine
  modified_base 34: mod_base = OTHER; note = 2'-Omethyluridine
  modified_base 37: mod_base = OTHER; note = Adenosine phosphorothiorate
  modified_base 41: mod_base = OTHER; note = 2'-fluorocytosine phosphorothiorate
  modified_base 42: mod_base = OTHER; note = 2'-fluoroadenosine
  modified_base 44: mod_base = OTHER; note = Adenosine phosphorothiorate
  modified_base 45: mod_base = OTHER; note = 2'-fluoroguanosine
  modified_base 46: mod_base = OTHER; note = 2'-Omethylguanosine
  modified_base 47: mod_base = OTHER; note = Uridine phosphorothiorate
  modified_base 48: mod_base = OTHER; note = 2'-Omethyluridine
  modified_base 52: mod_base = OTHER; note = 2'-fluoroguanosine
  modified_base 54: mod_base = OTHER; note = 2'-Omethyluridine phosphorothiorate
  modified_base 55: mod_base = OTHER; note = Uridine phosphorothiorate
  modified_base 61: mod_base = OTHER; note = 2'-fluorocytosine
  modified_base 63: mod_base = OTHER; note = Cytosine phosphorothiorate
  modified_base 64: mod_base = OTHER; note = 2'-Omethylguanosine
  modified_base 65: mod_base = OTHER; note = 2'-Omethylguanosine
  modified_base 66: mod_base = OTHER; note = Cytosine phosphorothiorate
  modified_base 67: mod_base = OTHER; note = 2'-fluoroguanosine
  modified_base 68: mod_base = OTHER; note = 2'-Omethylguanosine
  modified_base 70: mod_base = OTHER; note = Guanosine phosphorothiorate
  modified_base 71: mod_base = OTHER; note = 2'-fluorouridine
  modified_base 72: mod_base = OTHER; note = 2'-Omethylcytosine phosphorothiorate
  modified_base 74: mod_base = OTHER; note = Cytosine phosphorothiorate
  modified_base 75: mod_base = OTHER; note = Cytosine phosphorothiorate
  modified_base 76: mod_base = OTHER; note = 2'-Omethyladenosine

SEQ ID NO: 9314 - RNA, 74 nt, synthetic construct; identical to SEQ ID NO: 766
  source 1..74: mol_type = other RNA
  modified_base 1: mod_base = OTHER; note = 2'-Omethylguanosine phosphorothiorate
  modified_base 2: mod_base = OTHER; note = 2'-Omethylguanosine phosphorothiorate
  modified_base 3: mod_base = OTHER; note = 2'-Omethylcytosine
  modified_base 4: mod_base = OTHER; note = 2'-Omethyluridine
  modified_base 5: mod_base = OTHER; note = 2'-Omethylcytosine
  modified_base 6: mod_base = OTHER; note = 2'-Omethylcytosine
  modified_base 14: mod_base = OTHER; note = 2'-Omethyladenosine
  modified_base 15: mod_base = OTHER; note = 2'-Omethyladenosine
  modified_base 16: mod_base = OTHER; note = 2'-Omethyluridine
  modified_base 17: mod_base = OTHER; note = 2'-Omethylguanosine
  modified_base 18: mod_base = OTHER; note = 2'-Omethylguanosine
  modified_base 20: mod_base = OTHER; note = 2'-Omethyluridine
  modified_base 25: mod_base = OTHER; note = 2'-Omethylcytosine
  modified_base 33: mod_base = OTHER; note = 2'-fluorouridine
  modified_base 35: mod_base = OTHER; note = Cytosine phosphorothiorate
  modified_base 37: mod_base = OTHER; note = Adenosine phosphorothiorate
  modified_base 38: mod_base = OTHER; note = Adenosine phosphorothiorate
  modified_base 41: mod_base = OTHER; note = 2'-fluorocytosine
  modified_base 42: mod_base = OTHER; note = 2'-Omethyladenosine
  modified_base 43: mod_base = OTHER; note = 2'-Omethyladenosine
  modified_base 44: mod_base = OTHER; note = 2'-fluoroadenosine
  modified_base 49: mod_base = OTHER; note = 2'-Omethylcytosine
  modified_base 50: mod_base = OTHER; note = 2'-Omethylcytosine
  modified_base 52: mod_base = OTHER; note = 2'-Omethylguanosine
  modified_base 54: mod_base = OTHER; note = 2'-Omethyluridine
  modified_base 55: mod_base = OTHER; note = Uridine phosphorothiorate
  modified_base 56: mod_base = OTHER; note = 2'-Omethylcytosine
  modified_base 57: mod_base = OTHER; note = 2'-fluoroguanosine
  modified_base 59: mod_base = OTHER; note = 2'-Omethylguanosine
  modified_base 61: mod_base = OTHER; note = 2'-Omethylcytosine
  modified_base 62: mod_base = OTHER; note = 2'-Omethylcytosine
  modified_base 63: mod_base = OTHER; note = 2'-fluorocytosine
  modified_base 64: mod_base = OTHER; note = 2'-Omethylguanosine
  modified_base 65: mod_base = OTHER; note = 2'-Omethylguanosine
  modified_base 73: mod_base = OTHER; note = 2'-Omethylguanosine

SEQ ID NO: 9315 - RNA, 76 nt, synthetic construct; identical to SEQ ID NO: 625
  source 1..76: mol_type = other RNA
  modified_base 1: mod_base = OTHER; note = 2'-fluoroguanosine
  modified_base 5: mod_base = OTHER; note = 2'-fluorocytosine
  modified_base 11: mod_base = OTHER; note = 2'-Omethylcytosine
  modified_base 13: mod_base = OTHER; note = Cytosine phosphorothiorate
  modified_base 14: mod_base = OTHER; note = Adenosine phosphorothiorate
  modified_base 15: mod_base = OTHER; note = 2'-Omethyladenosine phosphorothiorate
  modified_base 17: mod_base = OTHER; note = 2'-Omethylguanosine
  modified_base 21: mod_base = OTHER; note = Adenosine phosphorothiorate
  modified_base 24: mod_base = OTHER; note = Guanosine phosphorothiorate
  modified_base 25: mod_base = OTHER; note = 2'-Omethylcytosine
  modified_base 26: mod_base = OTHER; note = 2'-fluoroadenosine
  modified_base 29: mod_base = OTHER; note = 2'-fluoroguanosine
  modified_base 30: mod_base = OTHER; note = 2'-fluoroguanosine
  modified_base 32: mod_base = OTHER; note = 2'-fluorocytosine
  modified_base 34: mod_base = OTHER; note = Uridine phosphorothiorate
  modified_base 37: mod_base = OTHER; note = Adenosine phosphorothiorate
  modified_base 38: mod_base = OTHER; note = 2'-fluoroadenosine
  modified_base 41: mod_base = OTHER; note = 2'-fluorocytosine
  modified_base 43: mod_base = OTHER; note = 2'-Omethyladenosine
  modified_base 46: mod_base = OTHER; note = 2'-Omethylguanosine
  modified_base 47: mod_base = OTHER; note = 2'-Omethyluridine
  modified_base 49: mod_base = OTHER; note = 2'-Omethylcytosine
  modified_base 56: mod_base = OTHER; note = 2'-Omethylcytosine
  modified_base 58: mod_base = OTHER; note = 2'-fluoroadenosine phosphorothiorate
  modified_base 61: mod_base = OTHER; note = 2'-Omethylcytosine phosphorothiorate
  modified_base 63: mod_base = OTHER; note = 2'-Omethylcytosine
  modified_base 64: mod_base = OTHER; note = 2'-Omethylguanosine
  modified_base 65: mod_base = OTHER; note = 2'-fluoroguanosine phosphorothiorate
  modified_base 69: mod_base = OTHER; note = 2'-Omethyladenosine
  modified_base 71: mod_base = OTHER; note = 2'-Omethyluridine
  modified_base 74: mod_base = OTHER; note = 2'-Omethylcytosine

SEQ ID NO: 9316 - RNA, 76 nt, synthetic construct; identical to SEQ ID NO: 625
  source 1..76: mol_type = other RNA
  modified_base 1: mod_base = OTHER; note = 2'-Omethylguanosine phosphorothiorate
  modified_base 2: mod_base = OTHER; note = 2'-Omethylguanosine phosphorothiorate
  modified_base 3: mod_base = OTHER; note = 2'-Omethylcytosine phosphorothiorate
  modified_base 4: mod_base = OTHER; note = 2'-Omethyluridine phosphorothiorate
  modified_base 5: mod_base = OTHER; note = 2'-Omethylcytosine phosphorothiorate
  modified_base 6: mod_base = OTHER; note = 2'-Omethylcytosine phosphorothiorate
  modified_base 10: mod_base = OTHER; note = 2'-Omethylguanosine
  modified_base 11: mod_base = OTHER; note = 2'-Omethylcytosine
  modified_base 12: mod_base = OTHER; note = 2'-Omethylguanosine
  modified_base 13: mod_base = OTHER; note = 2'-Omethylcytosine
  modified_base 49: mod_base = OTHER; note = 2'-Omethylcytosine
  modified_base 50: mod_base = OTHER; note = 2'-Omethylcytosine
  modified_base 51: mod_base = OTHER; note = 2'-Omethylguanosine
  modified_base 52: mod_base = OTHER; note = 2'-Omethylguanosine
  modified_base 53: mod_base = OTHER; note = 2'-Omethylguanosine

SEQ ID NO: 9317 - RNA, 76 nt, synthetic construct; identical to SEQ ID NO: 3289
  source 1..76: mol_type = other RNA
  modified_base 1: mod_base = OTHER; note = 2'-Omethylguanosine phosphorothiorate

SEQ ID NO: 9318 - RNA, 76 nt, synthetic construct; identical to SEQ ID NO: 625
  source 1..76: mol_type = other RNA
  modified_base 1: mod_base = OTHER; note = 2'-Omethylguanosine
  modified_base 2: mod_base = OTHER; note = 2'-Omethylguanosine
  modified_base 3: mod_base = OTHER; note = 2'-Omethylcytosine
  modified_base 4: mod_base = OTHER; note = 2'-Omethyluridine
  modified_base 5: mod_base = OTHER; note = 2'-Omethylcytosine
  modified_base 6: mod_base = OTHER; note = 2'-Omethylcytosine
  modified_base 10: mod_base = OTHER; note = 2'-Omethylguanosine
  modified_base 11: mod_base = OTHER; note = 2'-Omethylcytosine
  modified_base 12: mod_base = OTHER; note = Guanosine phosphorothiorate
  modified_base 13: mod_base = OTHER; note = 2'-fluorocytosine
  modified_base 14: mod_base = OTHER; note = 2'-Omethyladenosine
  modified_base 15: mod_base = OTHER; note = 2'-fluoroadenosine
  modified_base 16: mod_base = OTHER; note = 2'-Omethyluridine
  modified_base 17: mod_base = OTHER; note = 2'-Omethylguanosine
  modified_base 18: mod_base = OTHER; note = 2'-Omethylguanosine
  modified_base 19: mod_base = OTHER; note = 2'-fluoroadenosine
  modified_base 20: mod_base = OTHER; note = 2'-Omethyluridine
  modified_base 21: mod_base = OTHER; note = 2'-fluoroadenosine
  modified_base 22: mod_base = OTHER; note = 2'-Omethylguanosine
  modified_base 23: mod_base = OTHER; note = 2'-Omethylcytosine
  modified_base 24: mod_base = OTHER; note = 2'-Omethylguanosine
  modified_base 25: mod_base = OTHER; note = 2'-fluorocytosine
  modified_base 29: mod_base = OTHER; note = 2'-Omethylguanosine
  modified_base 33: mod_base = OTHER; note = 2'-fluorouridine
  modified_base 35: mod_base = OTHER; note = Cytosine phosphorothiorate
  modified_base 37: mod_base = OTHER; note = Adenosine phosphorothiorate
  modified_base 38: mod_base = OTHER; note = Adenosine phosphorothiorate
  modified_base 40: mod_base = OTHER; note = 2'-fluorouridine
  modified_base 41: mod_base = OTHER; note = 2'-Omethylcytosine
  modified_base 42: mod_base = OTHER; note = 2'-Omethyladenosine
  modified_base 43: mod_base = OTHER; note = 2'-Omethyladenosine
  modified_base 44: mod_base = OTHER; note = Adenosine phosphorothiorate
  modified_base 45: mod_base = OTHER; note = 2'-O-(2-Methoxyethyl) guanosine
  modified_base 46: mod_base = OTHER; note = Guanosine phosphorothiorate
  modified_base 49: mod_base = OTHER; note = 2'-Omethylcytosine
  modified_base 50: mod_base = OTHER; note = 2'-Omethylcytosine
  modified_base 51: mod_base = OTHER; note = Guanosine phosphorothiorate
  modified_base 52: mod_base = OTHER; note = 2'-Omethylguanosine
  modified_base 53: mod_base = OTHER; note = 2'-Omethylguanosine
  modified_base 54: mod_base = OTHER; note = Uridine phosphorothiorate
  modified_base 55: mod_base = OTHER; note = Uridine phosphorothiorate
  modified_base 56: mod_base = OTHER; note = 2'-Omethylcytosine
  modified_base 57: mod_base = OTHER; note = 2'-O-(2-Methoxyethyl) guanosine
  modified_base 61: mod_base = OTHER; note = 2'-Omethylcytosine
  modified_base 62: mod_base = OTHER; note = 2'-Omethylcytosine
  modified_base 63: mod_base = OTHER; note = 2'-fluorocytosine
  modified_base 64: mod_base = OTHER; note = 2'-Omethylguanosine
  modified_base 65: mod_base = OTHER; note = 2'-Omethylguanosine
  modified_base 66: mod_base = OTHER; note = 2'-Omethylcytosine
  modified_base 67: mod_base = OTHER; note = 2'-Omethylguanosine
  modified_base 68: mod_base = OTHER; note = 2'-Omethylguanosine
  modified_base 69: mod_base = OTHER; note = 2'-fluoroadenosine
  modified_base 70: mod_base = OTHER; note = 2'-fluoroguanosine
  modified_base 71: mod_base = OTHER; note = 2'-Omethyluridine
  modified_base 73: mod_base = OTHER; note = 2'-Omethylguanosine
  modified_base 74: mod_base = OTHER; note = Cytosine phosphorothiorate
  modified_base 75: mod_base = OTHER; note = 2'-fluorocytosine phosphorothiorate

SEQ ID NO: 9319 - RNA, 76 nt, synthetic construct; identical to SEQ ID NO: 625
  source 1..76: mol_type = other RNA
  modified_base 1: mod_base = OTHER; note = 2'-Omethylguanosine
  modified_base 10: mod_base = OTHER; note = 2'-Omethylguanosine
  modified_base 13: mod_base = OTHER; note = 2'-Omethylcytosine
  modified_base 17: mod_base = OTHER; note = Guanosine phosphorothiorate
  modified_base 18: mod_base = OTHER; note = 2'-Omethylguanosine
  modified_base 19: mod_base = OTHER; note = Adenosine phosphorothiorate
  modified_base 20: mod_base = OTHER; note = 2'-Omethyluridine
  modified_base 25: mod_base = OTHER; note = 2'-Omethylcytosine
  modified_base 29: mod_base = OTHER; note = 2'-Omethylguanosine
  modified_base 33: mod_base = OTHER; note = 2'-fluorouridine
  modified_base 35: mod_base = OTHER; note = Cytosine phosphorothiorate
  modified_base 37: mod_base = OTHER; note = Adenosine phosphorothiorate
  modified_base 38: mod_base = OTHER; note = Adenosine phosphorothiorate
  modified_base 43: mod_base = OTHER; note = 2'-Omethyladenosine
  modified_base 46: mod_base = OTHER; note = Guanosine phosphorothiorate
  modified_base 50: mod_base = OTHER; note = 2'-Omethylcytosine
  modified_base 52: mod_base = OTHER; note = 2'-Omethylguanosine
  modified_base 54: mod_base = OTHER; note = Uridine phosphorothiorate
  modified_base 55: mod_base = OTHER; note = Uridine phosphorothiorate
  modified_base 56: mod_base = OTHER; note = 2'-Omethylcytosine
  modified_base 57: mod_base = OTHER; note = Guanosine phosphorothiorate
  modified_base 62: mod_base = OTHER; note = 2'-Omethylcytosine
  modified_base 63: mod_base = OTHER; note = 2'-fluorocytosine
  modified_base 65: mod_base = OTHER; note = 2'-Omethylguanosine
  modified_base 71: mod_base = OTHER; note = 2'-Omethyluridine
  modified_base 73: mod_base = OTHER; note = 2'-Omethylguanosine

SEQ ID NO: 9320 - RNA, 75 nt, synthetic construct; identical to SEQ ID NO: 3306
  source 1..75: mol_type = other RNA
  modified_base 1: mod_base = OTHER; note = 2'-Omethylguanosine
  modified_base 60: mod_base = OTHER; note = 2'-Omethylcytosine
  modified_base 61: mod_base = OTHER; note = 2'-Omethyladenosine
  modified_base 62: mod_base = OTHER; note = 2'-fluorocytosine
  modified_base 63: mod_base = OTHER; note = 2'-Omethylguanosine
  modified_base 64: mod_base = OTHER; note = 2'-Omethyluridine
  modified_base 65: mod_base = OTHER; note = 2'-Omethylcytosine
  modified_base 66: mod_base = OTHER; note = 2'-Omethylguanosine
  modified_base 67: mod_base = OTHER; note = 2'-Omethylguanosine
  modified_base 68: mod_base = OTHER; note = 2'-Omethylguanosine
  modified_base 69: mod_base = OTHER; note = 2'-fluoroguanosine
  modified_base 70: mod_base = OTHER; note = 2'-Omethyluridine
  modified_base 71: mod_base = OTHER; note = 2'-Omethylcytosine
  modified_base 72: mod_base = OTHER; note = 2'-Omethyladenosine

SEQ ID NO: 9321 - RNA, 76 nt, synthetic construct; identical to SEQ ID NO: 625
  source 1..76: mol_type = other RNA
  modified_base 1: mod_base = OTHER; note = 2'-Omethylguanosine phosphorothiorate
  modified_base 2: mod_base = OTHER; note = 2'-Omethylguanosine phosphorothiorate
  modified_base 3: mod_base = OTHER; note = 2'-Omethylcytosine
  modified_base 4: mod_base = OTHER; note = 2'-Omethyluridine
  modified_base 5: mod_base = OTHER; note = 2'-Omethylcytosine
  modified_base 6: mod_base = OTHER; note = 2'-Omethylcytosine
  modified_base 10: mod_base = OTHER; note = 2'-Omethylguanosine
  modified_base 11: mod_base = OTHER; note = 2'-Omethylcytosine
  modified_base 12: mod_base = OTHER; note = 2'-Omethylguanosine
  modified_base 13: mod_base = OTHER; note = 2'-Omethylcytosine
  modified_base 14: mod_base = OTHER; note = 2'-Omethyladenosine
  modified_base 15: mod_base = OTHER; note = 2'-fluoroadenosine
  modified_base 16: mod_base = OTHER; note = 2'-Omethyluridine
  modified_base 17: mod_base = OTHER; note = 2'-Omethylguanosine
  modified_base 18: mod_base = OTHER; note = 2'-Omethylguanosine
  modified_base 19: mod_base = OTHER; note = 2'-fluoroadenosine
  modified_base 20: mod_base = OTHER; note = 2'-Omethyluridine
  modified_base 22: mod_base = OTHER; note = 2'-Omethylguanosine
  modified_base 23: mod_base = OTHER; note = 2'-Omethylcytosine
  modified_base 24: mod_base = OTHER; note = 2'-Omethylguanosine
  modified_base 25: mod_base = OTHER; note = 2'-Omethylcytosine
  modified_base 33: mod_base = OTHER; note = 2'-fluorouridine
  modified_base 35: mod_base = OTHER; note = Cytosine phosphorothiorate
  modified_base 37: mod_base = OTHER; note = Adenosine phosphorothiorate
  modified_base 38: mod_base = OTHER; note = Adenosine phosphorothiorate
  modified_base 40: mod_base = OTHER; note = 2'-fluorouridine
  modified_base 41: mod_base = OTHER; note = 2'-fluorocytosine
  modified_base 42: mod_base = OTHER; note = 2'-fluoroadenosine
  modified_base 43: mod_base = OTHER; note = 2'-fluoroadenosine
  modified_base 44: mod_base = OTHER; note = 2'-Omethyladenosine
  modified_base 45: mod_base = OTHER; note = 2'-Omethylguanosine
  modified_base 46: mod_base = OTHER; note = 2'-Omethylguanosine
  modified_base 49: mod_base = OTHER; note = 2'-Omethylcytosine
  modified_base 50: mod_base = OTHER; note = 2'-Omethylcytosine
  modified_base 51: mod_base = OTHER; note = 2'-Omethylguanosine
  modified_base 52: mod_base = OTHER; note = 2'-Omethylguanosine
  modified_base 53: mod_base = OTHER; note = 2'-Omethylguanosine
  modified_base 54: mod_base = OTHER; note = 2'-Omethyluridine
  modified_base 56: mod_base = OTHER; note = 2'-Omethylcytosine
  modified_base 59: mod_base = OTHER; note = 2'-Omethylguanosine
  modified_base 61: mod_base = OTHER; note = 2'-Omethylcytosine
  modified_base 62: mod_base = OTHER; note = 2'-Omethylcytosine
  modified_base 63: mod_base = OTHER; note = 2'-fluorocytosine
  modified_base 64: mod_base = OTHER; note = 2'-Omethylguanosine
  modified_base 65: mod_base = OTHER; note = 2'-Omethylguanosine
  modified_base 66: mod_base = OTHER; note = 2'-Omethylcytosine
  modified_base 67: mod_base = OTHER; note = 2'-Omethylguanosine
  modified_base 68: mod_base = OTHER; note = 2'-Omethylguanosine
  modified_base 73: mod_base = OTHER; note = 2'-Omethylguanosine

SEQ ID NO: 9322 - RNA, 76 nt, synthetic construct; identical to SEQ ID NO: 3490
  source 1..76: mol_type = other RNA
  modified_base 1: mod_base = OTHER; note = 2'-Omethylguanosine phosphorothiorate
  modified_base 2: mod_base = OTHER; note = 2'-Omethylguanosine phosphorothiorate
  modified_base 3: mod_base = OTHER; note = 2'-Omethylcytosine
  modified_base 4: mod_base = OTHER; note = 2'-Omethyluridine
  modified_base 5: mod_base = OTHER; note = 2'-Omethylcytosine
  modified_base 6: mod_base = OTHER; note = 2'-Omethylcytosine
  modified_base 16: mod_base = OTHER; note = 2'-Omethyluridine
  modified_base 17: mod_base = OTHER; note = 2'-Omethylguanosine
  modified_base 18: mod_base = OTHER; note = 2'-Omethylguanosine
  modified_base 20: mod_base = OTHER; note = 2'-Omethyluridine
  modified_base 25: mod_base = OTHER; note = 2'-Omethylcytosine
  modified_base 33: mod_base = OTHER; note = 2'-fluorouridine
  modified_base 35: mod_base = OTHER; note = Cytosine phosphorothiorate
  modified_base 37: mod_base = OTHER; note = Adenosine phosphorothiorate
  modified_base 38: mod_base = OTHER; note = Adenosine phosphorothiorate
  modified_base 41: mod_base = OTHER; note = 2'-Omethylcytosine
  modified_base 44: mod_base = OTHER; note = 2'-Omethyladenosine
  modified_base 45: mod_base = OTHER; note = 2'-Omethylguanosine
  modified_base 46: mod_base = OTHER; note = 2'-fluoroguanosine
  modified_base 47: mod_base = OTHER; note = 2'-fluorouridine
  modified_base 48: mod_base = OTHER; note = 2'-fluorouridine
  modified_base 56: mod_base = OTHER; note = 2'-Omethylcytosine
  modified_base 59: mod_base = OTHER; note = 2'-Omethylguanosine
  modified_base 73: mod_base = OTHER; note = 2'-Omethylguanosine

SEQ ID NO: 9323 - RNA, 76 nt, synthetic construct; identical to SEQ ID NO: 625
  source 1..76: mol_type = other RNA
  modified_base 1: mod_base = OTHER; note = 2'-Omethylguanosine phosphorothiorate
  modified_base 2: mod_base = OTHER; note = 2'-Omethylguanosine
  modified_base 3: mod_base = OTHER; note = 2'-Omethylcytosine
  modified_base 4: mod_base = OTHER; note = 2'-Omethyluridine
  modified_base 5: mod_base = OTHER; note = 2'-Omethylcytosine
  modified_base 6: mod_base = OTHER; note = 2'-Omethylcytosine
  modified_base 10: mod_base = OTHER; note = 2'-Omethylguanosine
  modified_base 11: mod_base = OTHER; note = 2'-Omethylcytosine
  modified_base 12: mod_base = OTHER; note = 2'-Omethylguanosine
  modified_base 13: mod_base = OTHER; note = 2'-Omethylcytosine
  modified_base 14: mod_base = OTHER; note = 2'-Omethyladenosine
  modified_base 15: mod_base = OTHER; note = 2'-Omethyladenosine
  modified_base 16: mod_base = OTHER; note = 2'-Omethyluridine
  modified_base 17: mod_base = OTHER; note = 2'-Omethylguanosine
  modified_base 18: mod_base = OTHER; note = 2'-Omethylguanosine
  modified_base 19: mod_base = OTHER; note = 2'-Omethyladenosine
  modified_base 20: mod_base = OTHER; note = 2'-Omethyluridine
  modified_base 22: mod_base = OTHER; note = 2'-Omethylguanosine
  modified_base 23: mod_base = OTHER; note = 2'-Omethylcytosine
  modified_base 24: mod_base = OTHER; note = 2'-Omethylguanosine
  modified_base 25: mod_base = OTHER; note = 2'-Omethylcytosine
  modified_base 40: mod_base = OTHER; note = 2'-fluorouridine
  modified_base 41: mod_base = OTHER; note = 2'-fluorocytosine
  modified_base 42: mod_base = OTHER; note = 2'-fluoroadenosine
  modified_base 43: mod_base = OTHER; note = 2'-fluoroadenosine
  modified_base 44: mod_base = OTHER; note = 2'-Omethyladenosine
  modified_base 45: mod_base = OTHER; note = 2'-Omethylguanosine
  modified_base 46: mod_base = OTHER; note = 2'-Omethylguanosine
  modified_base 49: mod_base = OTHER; note = 2'-Omethylcytosine
  modified_base 50: mod_base = OTHER; note = 2'-Omethylcytosine
  modified_base 51: mod_base = OTHER; note = 2'-Omethylguanosine
  modified_base 52: mod_base = OTHER; note = 2'-Omethylguanosine
  modified_base 53: mod_base = OTHER; note = 2'-Omethylguanosine
  modified_base 54: mod_base = OTHER; note = Uridine phosphorothiorate
  modified_base 55: mod_base = OTHER; note = Uridine phosphorothiorate
  modified_base 56: mod_base = OTHER; note = Cytosine phosphorothiorate
  modified_base 57: mod_base = OTHER; note = Guanosine phosphorothiorate
  modified_base 61: mod_base = OTHER; note = 2'-Omethylcytosine
  modified_base 62: mod_base = OTHER; note = 2'-Omethylcytosine
  modified_base 63: mod_base = OTHER; note = 2'-fluorocytosine
  modified_base 64: mod_base = OTHER; note = 2'-Omethylguanosine
  modified_base 65: mod_base = OTHER; note = 2'-Omethylguanosine
  modified_base 66: mod_base = OTHER; note = 2'-Omethylcytosine
  modified_base 67: mod_base = OTHER; note = 2'-Omethylguanosine
  modified_base 68: mod_base = OTHER; note = 2'-Omethylguanosine
  modified_base 69: mod_base = OTHER; note = 2'-Omethyladenosine
  modified_base 71: mod_base = OTHER; note = 2'-Omethyluridine
  modified_base 72: mod_base = OTHER; note = 2'-Omethylcytosine

SEQ ID NO: 9324 - RNA, 86 nt, synthetic construct; identical to SEQ ID NO: 3290
  source 1..86: mol_type = other RNA
  modified_base 1: mod_base = OTHER; note = 2'-Omethyladenosine phosphorothiorate
  modified_base 2: mod_base = OTHER; note = 2'-Omethylcytosine phosphorothiorate
  modified_base 9: mod_base = OTHER; note = Guanosine phosphorothiorate
  modified_base 10: mod_base = OTHER; note = 2'-fluoroguanosine
  modified_base 29: mod_base = OTHER; note = Guanosine phosphorothiorate
  modified_base 30: mod_base = OTHER; note = 2'-Omethylguanosine
  modified_base 74: mod_base = OTHER; note = Adenosine phosphorothiorate
  modified_base 84: mod_base = OTHER; note = Cytosine phosphorothiorate
  modified_base 85: mod_base = OTHER; note = 2'-Omethylcytosine

SEQ ID NO: 9325 - DNA, 74 bp, synthetic construct; identical to SEQ ID NO: 3384
  source 1..74: mol_type = other DNA
  modified_base 1: mod_base = OTHER; note = 2'-Omethylguanosine phosphorothiorate
  modified_base 2: mod_base = OTHER; note = 2'-Omethylguanosine
  modified_base 73: mod_base = OTHER; note = 2'-Omethylguanosine
  misc_feature 1..71: note = RNA
  misc_feature 72: note = DNA
  misc_feature 73..74: note = RNA

SEQ ID NO: 9326 - RNA, 76 nt, synthetic construct; identical to SEQ ID NO: 3419
  source 1..76: mol_type = other RNA
  modified_base 1: mod_base = OTHER; note = 2'-Omethylguanosine
  modified_base 19: mod_base = OTHER; note = 2'-Omethyladenosine
  modified_base 20: mod_base = OTHER; note = 2'-Omethyluridine
  modified_base 21: mod_base = OTHER; note = 2'-fluoroadenosine
  modified_base 22: mod_base = OTHER; note = 2'-Omethylguanosine
  modified_base 40: mod_base = OTHER; note = 2'-fluorocytosine
  modified_base 41: mod_base = OTHER; note = 2'-Omethylguanosine
  modified_base 42: mod_base = OTHER; note = 2'-Omethylguanosine
  modified_base 43: mod_base = OTHER; note = 2'-Omethyluridine
  modified_base 73: mod_base = OTHER; note = 2'-Omethylguanosine

SEQ ID NO: 9327 - RNA, 85 nt, synthetic construct; identical to SEQ ID NO: 3317
  source 1..85: mol_type = other RNA
  modified_base 1: mod_base = OTHER; note = 2'-Omethylguanosine phosphorothiorate
  modified_base 19: mod_base = OTHER; note = 2'-Omethyluridine phosphorothiorate
  modified_base 48: mod_base = OTHER; note = 2'-Omethylguanosine
  modified_base 54: mod_base = OTHER; note = Cytosine phosphorothiorate
  modified_base 57: mod_base = OTHER; note = Cytosine phosphorothiorate
  modified_base 72: mod_base = OTHER; note = 2'-fluorouridine
  modified_base 80: mod_base = OTHER; note = Guanosine phosphorothiorate

SEQ ID NO: 9328 - RNA, 85 nt, synthetic construct; identical to SEQ ID NO: 3288
  source 1..85: mol_type = other RNA
  modified_base 1: mod_base = OTHER; note = 2'-Omethylcytosine phosphorothiorate
  modified_base 15: mod_base = OTHER; note = 2'-Omethyluridine
  modified_base 22: mod_base = OTHER; note = 2'-fluoroguanosine
  modified_base 46: mod_base = OTHER; note = 2'-Omethyladenosine
  modified_base 73: mod_base = OTHER; note = 2'-fluoroadenosine
  modified_base 84: mod_base = OTHER; note = 2'-fluorocytosine

SEQ ID NO: 9329 - DNA, 76 bp, synthetic construct; identical to SEQ ID NO: 1924
  source 1..76: mol_type = other DNA
  modified_base 1: mod_base = OTHER; note = 2'-Omethylguanosine phosphorothiorate
  modified_base 2: mod_base = OTHER; note = 2'-Omethylguanosine phosphorothiorate
  modified_base 7: mod_base = OTHER; note = Guanosine phosphorothiorate
  modified_base 8: mod_base = OTHER; note = 2'-O-(2-Methoxyethyl) thymine phosphorothiorate
  modified_base 11: mod_base = OTHER; note = 2'-Omethylcytosine phosphorothiorate
  modified_base 13: mod_base = OTHER; note = Cytosine phosphorothiorate
  modified_base 17: mod_base = OTHER; note = Guanosine phosphorothiorate
  modified_base 20: mod_base = OTHER; note = 2'-O-(2-Methoxyethyl) thymine
  modified_base 21: mod_base = OTHER; note = Adenosine phosphorothiorate
  modified_base 23: mod_base = OTHER; note = Cytosine phosphorothiorate
  modified_base 24: mod_base = OTHER; note = deoxyguanosine phosphorothiorate
  modified_base 25: mod_base = OTHER; note = Cytosine phosphorothiorate
  modified_base 26: mod_base = OTHER; note = 2'-Omethyladenosine phosphorothiorate
  modified_base 27: mod_base = OTHER; note = 2'-Omethyluridine
  modified_base 29: mod_base = OTHER; note = Guanosine phosphorothiorate
  modified_base 32: mod_base = OTHER; note = 2'-O-(2-Methoxyethyl) 5-methylcytosine
  modified_base 33: mod_base = OTHER; note = Uridine phosphorothiorate
  modified_base 41: mod_base = OTHER; note = Cytosine phosphorothiorate
  modified_base 42: mod_base = OTHER; note = 2'-Omethyladenosine
  modified_base 44: mod_base = OTHER; note = 2'-O-(2-Methoxyethyl) adenosine
  modified_base 45: mod_base = OTHER; note = 2'-fluoroguanosine
  modified_base 47: mod_base = OTHER; note = Uridine phosphorothiorate
  modified_base 48: mod_base = OTHER; note = 2'-Omethyluridine
  modified_base 50: mod_base = OTHER; note = 2'-O-(2-Methoxyethyl) 5-methylcytosine phosphorothiorate
  modified_base 51: mod_base = OTHER; note = 2'-O-(2-Methoxyethyl) guanosine
  modified_base 54: mod_base = OTHER; note = 2'-Omethyluridine
  modified_base 56: mod_base = OTHER; note = Cytosine phosphorothiorate
  modified_base 57: mod_base = OTHER; note = 2'-O-(2-Methoxyethyl) guanosine
  modified_base 58: mod_base = OTHER; note = Adenosine phosphorothiorate
  modified_base 61: mod_base = OTHER; note = Cytosine phosphorothiorate
  modified_base 62: mod_base = OTHER; note = 2'-O-(2-Methoxyethyl) 5-methylcytosine
  modified_base 63: mod_base = OTHER; note = 2'-fluorocytosine
  modified_base 68: mod_base = OTHER; note = Guanosine phosphorothiorate
  modified_base 74: mod_base = OTHER; note = 2'-O-(2-Methoxyethyl) 5-methylcytosine phosphorothiorate
  modified_base 75: mod_base = OTHER; note = 2'-Omethylcytosine phosphorothiorate
  misc_feature 1..4: note = RNA
  misc_feature 5: note = DNA
  misc_feature 6..13: note = RNA
  misc_feature 14: note = DNA
  misc_feature 15..21: note = RNA
  misc_feature 22: note = DNA
  misc_feature 23: note = RNA
  misc_feature 24: note = DNA
  misc_feature 25..29: note = RNA
  misc_feature 30: note = DNA
  misc_feature 31..58: note = RNA
  misc_feature 59..60: note = DNA
  misc_feature 61..71: note = RNA
  misc_feature 72: note = DNA
  misc_feature 73..76: note = RNA

SEQ ID NO: 9330 - RNA, 85 nt, synthetic construct; identical to SEQ ID NO: 3317
  source 1..85: mol_type = other RNA
  modified_base 1: mod_base = OTHER; note = 2'-Omethylguanosine phosphorothiorate
  modified_base 3: mod_base = OTHER; note = Uridine phosphorothiorate
  modified_base 39: mod_base = OTHER; note = 2'-Omethyluridine
  modified_base 47: mod_base = OTHER; note = 2'-fluoroguanosine
  modified_base 55: mod_base = OTHER; note = 2'-Omethylcytosine phosphorothiorate
  modified_base 64: mod_base = OTHER; note = 2'-fluorouridine
  modified_base 82: mod_base = OTHER; note = Guanosine phosphorothiorate

SEQ ID NO: 9331 - RNA, 86 nt, synthetic construct; identical to SEQ ID NO: 3290
  source 1..86: mol_type = other RNA
  modified_base 85: mod_base = OTHER; note = 2'-fluorocytosine

SEQ ID NO: 9332 - RNA, 75 nt, synthetic construct; identical to SEQ ID NO: 3306
  source 1..75: mol_type = other RNA
  modified_base 21: mod_base = OTHER; note = 2'-Omethylguanosine
  modified_base 22: mod_base = OTHER; note = 2'-Omethylcytosine
  modified_base 23: mod_base = OTHER; note = 2'-Omethylguanosine
  modified_base 24: mod_base = OTHER; note = 2'-Omethylcytosine
  modified_base 48: mod_base = OTHER; note = 2'-Omethylguanosine
  modified_base 49: mod_base = OTHER; note = 2'-Omethylcytosine
  modified_base 50: mod_base = OTHER; note = 2'-Omethylguanosine
  modified_base 51: mod_base = OTHER; note = 2'-Omethyluridine
  modified_base 52: mod_base = OTHER; note = 2'-Omethylguanosine
  modified_base 72: mod_base = OTHER; note = 2'-Omethyladenosine

SEQ ID NO: 9333 - RNA, 76 nt, synthetic construct; identical to SEQ ID NO: 3289
  source 1..76: mol_type = other RNA
  modified_base 1: mod_base = OTHER; note = 2'-Omethylguanosine phosphorothiorate
  modified_base 2: mod_base = OTHER; note = 2'-Omethylcytosine
  modified_base 3: mod_base = OTHER; note = 2'-Omethylcytosine
  modified_base 4: mod_base = OTHER; note = 2'-Omethyluridine
  modified_base 5: mod_base = OTHER; note = 2'-Omethylguanosine
  modified_base 6: mod_base = OTHER; note = 2'-Omethylguanosine
  modified_base 27: mod_base = OTHER; note = 2'-Omethyluridine
  modified_base 28: mod_base = OTHER; note = 2'-Omethylcytosine
  modified_base 29: mod_base = OTHER; note = 2'-Omethyladenosine
  modified_base 30: mod_base = OTHER; note = 2'-fluoroguanosine
  modified_base 40: mod_base = OTHER; note = 2'-fluorocytosine
  modified_base 41: mod_base = OTHER; note = 2'-Omethyluridine
  modified_base 42: mod_base = OTHER; note = 2'-Omethylguanosine
  modified_base 43: mod_base = OTHER; note = 2'-Omethyladenosine
  modified_base 73: mod_base = OTHER; note = 2'-Omethylguanosine

SEQ ID NO: 9334 - RNA, 76 nt, synthetic construct; identical to SEQ ID NO: 625
  source 1..76: mol_type = other RNA
  modified_base 3: mod_base = OTHER; note = Cytosine phosphorothiorate
  modified_base 4: mod_base = OTHER; note = 2'-Omethyluridine
  modified_base 10: mod_base = OTHER; note = Guanosine phosphorothiorate
  modified_base 13: mod_base = OTHER; note = 2'-Omethylcytosine
  modified_base 14: mod_base = OTHER; note = 2'-fluoroadenosine
  modified_base 15: mod_base = OTHER; note = 2'-fluoroadenosine phosphorothiorate
  modified_base 16: mod_base = OTHER; note = 2'-Omethyluridine
  modified_base 17: mod_base = OTHER; note = 2'-Omethylguanosine
  modified_base 18: mod_base = OTHER; note = Guanosine phosphorothiorate
  modified_base 22: mod_base = OTHER; note = 2'-Omethylguanosine
  modified_base 23: mod_base = OTHER; note = 2'-fluorocytosine phosphorothiorate
  modified_base 24: mod_base = OTHER; note = Guanosine phosphorothiorate
  modified_base 25: mod_base = OTHER; note = 2'-fluorocytosine phosphorothiorate
  modified_base 26: mod_base = OTHER; note = 2'-Omethyladenosine
  modified_base 28: mod_base = OTHER; note = 2'-fluorouridine
  modified_base 29: mod_base = OTHER; note = 2'-Omethylguanosine
  modified_base 34: mod_base = OTHER; note = 2'-Omethyluridine
  modified_base 40: mod_base = OTHER; note = Uridine phosphorothiorate
  modified_base 41: mod_base = OTHER; note = 2'-Omethylcytosine phosphorothiorate
  modified_base 42: mod_base = OTHER; note = 2'-Omethyladenosine
  modified_base 43: mod_base = OTHER; note = 2'-Omethyladenosine
  modified_base 44: mod_base = OTHER; note = 2'-Omethyladenosine
  modified_base 45: mod_base = OTHER; note = Guanosine phosphorothiorate
  modified_base 47: mod_base = OTHER; note = 2'-Omethyluridine
  modified_base 50: mod_base = OTHER; note = 2'-Omethylcytosine
  modified_base 53: mod_base = OTHER; note = Guanosine phosphorothiorate
  modified_base 54: mod_base = OTHER; note = 2'-fluorouridine
  modified_base 57: mod_base = OTHER; note = 2'-Omethylguanosine
  modified_base 58: mod_base = OTHER; note = 2'-fluoroadenosine
  modified_base 65: mod_base = OTHER; note = 2'-fluoroguanosine
  modified_base 66: mod_base = OTHER; note = Cytosine phosphorothiorate
  modified_base 68: mod_base = OTHER; note = 2'-fluoroguanosine
  modified_base 72: mod_base = OTHER; note = Cytosine phosphorothiorate
  modified_base 73: mod_base = OTHER; note = 2'-Omethylguanosine
  modified_base 74: mod_base = OTHER; note = 2'-Omethylcytosine
  modified_base 75: mod_base = OTHER; note = 2'-Omethylcytosine
  modified_base 76: mod_base = OTHER; note = 2'-Omethyladenosine

SEQ ID NO: 9335 - RNA, 76 nt, synthetic construct
  source 1..76: mol_type = other RNA
gatagagtggcgcaatggatagcgcattggacttcaaattcaaaggttccgggttcgagtcccggctctatcgcca

SEQ ID NO: 9336 - RNA, 74 nt, synthetic construct; identical to SEQ ID NO: 766
  source 1..74: mol_type = other RNA
  modified_base 1: mod_base = OTHER; note = 2'-Omethylguanosine phosphorothiorate
  modified_base 2: mod_base = OTHER; note = 2'-Omethylguanosine
  modified_base 3: mod_base = OTHER; note = 2'-Omethylcytosine
  modified_base 4: mod_base = OTHER; note = 2'-Omethyluridine
  modified_base 5: mod_base = OTHER; note = 2'-Omethylcytosine
  modified_base 6: mod_base = OTHER; note = 2'-Omethylcytosine
  modified_base 43: mod_base = OTHER; note = 2'-Omethyladenosine
  modified_base 44: mod_base = OTHER; note = 2'-Omethyladenosine
  modified_base 45: mod_base = OTHER; note = 2'-Omethylguanosine
  modified_base 46: mod_base = OTHER; note = 2'-fluoroguanosine
  modified_base 48: mod_base = OTHER; note = 2'-fluorouridine
  modified_base 49: mod_base = OTHER; note = 2'-Omethylcytosine
  modified_base 73: mod_base = OTHER; note = 2'-Omethylguanosine

SEQ ID NO: 9337 - RNA, 76 nt, synthetic construct; identical to SEQ ID NO: 625
  source 1..76: mol_type = other RNA
  modified_base 1: mod_base = OTHER; note = 2'-Omethylguanosine
  modified_base 2: mod_base = OTHER; note = 2'-Omethylguanosine
  modified_base 3: mod_base = OTHER; note = 2'-Omethylcytosine
  modified_base 10: mod_base = OTHER; note = 2'-Omethylguanosine
  modified_base 11: mod_base = OTHER; note = 2'-Omethylcytosine
  modified_base 12: mod_base = OTHER; note = 2'-Omethylguanosine
  modified_base 13: mod_base = OTHER; note = 2'-Omethylcytosine
  modified_base 14: mod_base = OTHER; note = 2'-Omethyladenosine
  modified_base 15: mod_base = OTHER; note = 2'-fluoroadenosine
  modified_base 16: mod_base = OTHER; note = 2'-Omethyluridine
  modified_base 17: mod_base = OTHER; note = 2'-Omethylguanosine
  modified_base 18: mod_base = OTHER; note = 2'-Omethylguanosine
  modified_base 19: mod_base = OTHER; note = 2'-fluoroadenosine
  modified_base 20: mod_base = OTHER; note = 2'-Omethyluridine
  modified_base 21: mod_base = OTHER; note = 2'-fluoroadenosine
  modified_base 22: mod_base = OTHER; note = 2'-Omethylguanosine
  modified_base 23: mod_base = OTHER; note = 2'-Omethylcytosine
  modified_base 24: mod_base = OTHER; note = 2'-Omethylguanosine
  modified_base 25: mod_base = OTHER; note = 2'-Omethylcytosine
  modified_base 38: mod_base = OTHER; note = Adenosine phosphorothiorate
  modified_base 39: mod_base = OTHER; note = Uridine phosphorothiorate
  modified_base 40: mod_base = OTHER; note = 2'-fluorouridine
  modified_base 43: mod_base = OTHER; note = 2'-Omethyladenosine
  modified_base 44: mod_base = OTHER; note = 2'-Omethyladenosine
  modified_base 45: mod_base = OTHER; note = 2'-Omethylguanosine
  modified_base 46: mod_base = OTHER; note = 2'-fluoroguanosine
  modified_base 48: mod_base = OTHER; note = 2'-fluorouridine
  modified_base 49: mod_base = OTHER; note = 2'-Omethylcytosine
  modified_base 50: mod_base = OTHER; note = 2'-Omethylcytosine
  modified_base 54: mod_base = OTHER; note = Uridine phosphorothiorate
  modified_base 55: mod_base = OTHER; note = Uridine phosphorothiorate
  modified_base 56: mod_base = OTHER; note = 2'-Omethylcytosine
  modified_base 57: mod_base = OTHER; note = Guanosine phosphorothiorate
  modified_base 61: mod_base = OTHER; note = 2'-Omethylcytosine
  modified_base 62: mod_base = OTHER; note = 2'-Omethylcytosine
  modified_base 63: mod_base = OTHER; note = 2'-fluorocytosine
  modified_base 64: mod_base = OTHER; note = 2'-Omethylguanosine
  modified_base 65: mod_base = OTHER; note = 2'-Omethylguanosine
  modified_base 66: mod_base = OTHER; note = 2'-Omethylcytosine
  modified_base 67: mod_base = OTHER; note = 2'-Omethylguanosine
  modified_base 68: mod_base = OTHER; note = 2'-Omethylguanosine

SEQ ID NO: 9338 - RNA, 76 nt, synthetic construct; identical to SEQ ID NO: 625
  source 1..76: mol_type = other RNA
  modified_base 14: mod_base = OTHER; note = 2'-Omethyladenosine
  modified_base 15: mod_base = OTHER; note = 2'-Omethyladenosine
  modified_base 16: mod_base = OTHER; note = 2'-Omethyluridine
  modified_base 17: mod_base = OTHER; note = 2'-Omethylguanosine
  modified_base 18: mod_base = OTHER; note = 2'-Omethylguanosine
  modified_base 19: mod_base = OTHER; note = 2'-Omethyladenosine
  modified_base 20: mod_base = OTHER; note = 2'-Omethyluridine
  modified_base 40: mod_base = OTHER; note = 2'-fluorouridine
  modified_base 41: mod_base = OTHER; note = 2'-fluorocytosine
  modified_base 42: mod_base = OTHER; note = 2'-fluoroadenosine
  modified_base 43: mod_base = OTHER; note = 2'-fluoroadenosine
  modified_base 44: mod_base = OTHER; note = 2'-Omethyladenosine
  modified_base 45: mod_base = OTHER; note = 2'-Omethylguanosine
  modified_base 46: mod_base = OTHER; note = 2'-Omethylguanosine
  modified_base 54: mod_base = OTHER; note = Uridine phosphorothiorate
  modified_base 55: mod_base = OTHER; note = Uridine phosphorothiorate
  modified_base 56: mod_base = OTHER; note = Cytosine phosphorothiorate
  modified_base 57: mod_base = OTHER; note = Guanosine phosphorothiorate
  modified_base 61: mod_base = OTHER; note = 2'-Omethylcytosine
  modified_base 62: mod_base = OTHER; note = 2'-Omethylcytosine
  modified_base 63: mod_base = OTHER; note = 2'-Omethylcytosine
  modified_base 64: mod_base = OTHER; note = 2'-Omethylguanosine
  modified_base 65: mod_base = OTHER; note = 2'-Omethylguanosine
  modified_base 66: mod_base = OTHER; note = 2'-Omethylcytosine
  modified_base 67: mod_base = OTHER; note = 2'-Omethylguanosine
  modified_base 68: mod_base = OTHER; note = 2'-Omethylguanosine
  modified_base 69: mod_base = OTHER; note = 2'-Omethyladenosine

SEQ ID NO: 9339 - RNA, 84 nt, synthetic construct
  source 1..84: mol_type = other RNA
gtcagtgtggccgagtggttaaggcgtttgacttcaaatcaaatgggttcgcccgcacaggttcgaatcctgtcgctgacgcca

SEQ ID NO: 9340 - DNA, 76 bp, synthetic construct; identical to SEQ ID NO: 1924
  source 1..76: mol_type = other DNA
  misc_feature 1..75: note = RNA
  misc_feature 76: note = DNA

SEQ ID NO: 9341 - RNA, 76 nt, synthetic construct; identical to SEQ ID NO: 3342
  source 1..76: mol_type = other RNA
  modified_base 1: mod_base = OTHER; note = 2'-Omethylguanosine
  modified_base 2: mod_base = OTHER; note = 2'-Omethylguanosine
  modified_base 3: mod_base = OTHER; note = 2'-Omethylcytosine
  modified_base 4: mod_base = OTHER; note = 2'-Omethyluridine
  modified_base 5: mod_base = OTHER; note = 2'-Omethylcytosine
  modified_base 6: mod_base = OTHER; note = 2'-Omethylcytosine
  modified_base 14: mod_base = OTHER; note = 2'-Omethyladenosine
  modified_base 15: mod_base = OTHER; note = 2'-Omethyladenosine
  modified_base 16: mod_base = OTHER; note = 2'-Omethyluridine
  modified_base 17: mod_base = OTHER; note = 2'-Omethylguanosine
  modified_base 18: mod_base = OTHER; note = 2'-Omethylguanosine
  modified_base 20: mod_base = OTHER; note = 2'-Omethyluridine
  modified_base 25: mod_base = OTHER; note = 2'-Omethylcytosine
  modified_base 41: mod_base = OTHER; note = 2'-Omethylcytosine
  modified_base 42: mod_base = OTHER; note = 2'-Omethylguanosine
  modified_base 43: mod_base = OTHER; note = 2'-Omethyladenosine
  modified_base 44: mod_base = OTHER; note = 2'-Omethyladenosine
  modified_base 49: mod_base = OTHER; note = 2'-Omethylcytosine
  modified_base 50: mod_base = OTHER; note = 2'-Omethylcytosine
  modified_base 52: mod_base = OTHER; note = 2'-Omethylguanosine
  modified_base 54: mod_base = OTHER; note = 2'-Omethyluridine
  modified_base 55: mod_base = OTHER; note = Uridine phosphorothiorate
  modified_base 56: mod_base = OTHER; note = 2'-Omethylcytosine
  modified_base 57: mod_base = OTHER; note = 2'-fluoroguanosine
  modified_base 59: mod_base = OTHER; note = 2'-Omethylguanosine
  modified_base 61: mod_base = OTHER; note = 2'-Omethylcytosine
  modified_base 62: mod_base = OTHER; note = 2'-Omethylcytosine
  modified_base 63: mod_base = OTHER; note = 2'-fluorocytosine
  modified_base 64: mod_base = OTHER; note = 2'-Omethylguanosine
  modified_base 65: mod_base = OTHER; note = 2'-Omethylguanosine
  modified_base 73: mod_base = OTHER; note = 2'-Omethylguanosine

SEQ ID NO: 9342 - RNA, 85 nt, synthetic construct; identical to SEQ ID NO: 3288
  source 1..85: mol_type = other RNA
  modified_base 1: mod_base = OTHER; note = 2'-Omethylcytosine phosphorothiorate
  modified_base 2: mod_base = OTHER; note = 2'-fluorocytosine
  modified_base 13: mod_base = OTHER; note = 2'-fluoroadenosine phosphorothiorate
  modified_base 20: mod_base = OTHER; note = Adenosine phosphorothiorate
  modified_base 27: mod_base = OTHER; note = 2'-fluorouridine
  modified_base 29: mod_base = OTHER; note = 2'-fluoroguanosine
  modified_base 32: mod_base = OTHER; note = 2'-fluorouridine
  modified_base 36: mod_base = OTHER; note = Guanosine phosphorothiorate
  modified_base 42: mod_base = OTHER; note = 2'-Omethyladenosine
  modified_base 46: mod_base = OTHER; note = 2'-Omethyladenosine
  modified_base 52: mod_base = OTHER; note = 2'-Omethylguanosine
  modified_base 54: mod_base = OTHER; note = 2'-Omethylcytosine
  modified_base 60: mod_base = OTHER; note = 2'-Omethylguanosine
  modified_base 75: mod_base = OTHER; note = 2'-fluorouridine
  modified_base 76: mod_base = OTHER; note = 2'-Omethylcytosine
  modified_base 85: mod_base = OTHER; note = 2'-fluoroadenosine

SEQ ID NO: 9343 - RNA, 85 nt, synthetic construct; identical to SEQ ID NO: 3317
  source 1..85: mol_type = other RNA
  modified_base 1: mod_base = OTHER; note = 2'-Omethylguanosine phosphorothiorate
  modified_base 15: mod_base = OTHER; note = 2'-Omethylguanosine
  modified_base 26: mod_base = OTHER; note = 2'-fluoroguanosine
  modified_base 46: mod_base = OTHER; note = 2'-Omethylguanosine phosphorothiorate
  modified_base 72: mod_base = OTHER; note = Uridine phosphorothiorate
  modified_base 73: mod_base = OTHER; note = 2'-fluoroguanosine
  modified_base 82: mod_base = OTHER; note = 2'-Omethylguanosine

SEQ ID NO: 9344 - RNA, 76 nt, synthetic construct; identical to SEQ ID NO: 625
  source 1..76: mol_type = other RNA
  modified_base 1: mod_base = OTHER; note = 2'-Omethylguanosine phosphorothiorate
  modified_base 2: mod_base = OTHER; note = 2'-Omethylguanosine
  modified_base 33: mod_base = OTHER; note = 2'-fluorouridine
  modified_base 35: mod_base = OTHER; note = Cytosine phosphorothiorate
  modified_base 37: mod_base = OTHER; note = Adenosine phosphorothiorate
  modified_base 38: mod_base = OTHER; note = Adenosine phosphorothiorate
  modified_base 52: mod_base = OTHER; note = 2'-Omethylguanosine
  modified_base 68: mod_base = OTHER; note = 2'-Omethylguanosine
  modified_base 73: mod_base = OTHER; note = 2'-Omethylguanosine
  modified_base 75: mod_base = OTHER; note = 2'-fluorocytosine phosphorothiorate

SEQ ID NO: 9345 - RNA, 85 nt, synthetic construct; identical to SEQ ID NO: 3288
  source 1..85: mol_type = other RNA
  modified_base 1: mod_base = OTHER; note = 2'-Omethylcytosine
  modified_base 11: mod_base = OTHER; note = Cytosine phosphorothiorate
  modified_base 26: mod_base = OTHER; note = 2'-fluorouridine
  modified_base 30: mod_base = OTHER; note = 2'-fluoroadenosine
  modified_base 34: mod_base = OTHER; note = 2'-fluorocytosine
  modified_base 43: mod_base = OTHER; note = 2'-Omethyluridine
  modified_base 46: mod_base = OTHER; note = 2'-Omethyladenosine
  modified_base 57: mod_base = OTHER; note = 2'-Omethylcytosine
  modified_base 64: mod_base = OTHER; note = Uridine phosphorothiorate
  modified_base 76: mod_base = OTHER; note = 2'-fluorocytosine
  modified_base 84: mod_base = OTHER; note = Cytosine phosphorothiorate

SEQ ID NO: 9346 - RNA, 76 nt, synthetic construct
  source 1..76: mol_type = other RNA
gccccagtggcctaatggataaggcgtcagccttcaaagttgaagattgcgggttcgagtcccgtctggggtacca

SEQ ID NO: 9347 - RNA, 75 nt, synthetic construct; identical to SEQ ID NO: 1045
  source 1..75: mol_type = other RNA
  modified_base 1: mod_base = OTHER; note = 2'-Omethylguanosine phosphorothiorate
  modified_base 2: mod_base = OTHER; note = 2'-Omethylguanosine phosphorothiorate
  modified_base 15: mod_base = OTHER; note = Adenosine phosphorothiorate
  modified_base 33: mod_base = OTHER; note = Uridine phosphorothiorate
  modified_base 34: mod_base = OTHER; note = 2'-fluorouridine
  modified_base 73: mod_base = OTHER; note = 2'-fluorocytosine phosphorothiorate
  modified_base 74: mod_base = OTHER; note = 2'-Omethylcytosine phosphorothiorate
  modified_base 75: mod_base = OTHER; note = 2'-Omethyladenosine

SEQ ID NO: 9348 - RNA, 76 nt, synthetic construct; identical to SEQ ID NO: 3289
  source 1..76: mol_type = other RNA
  modified_base 1: mod_base = OTHER; note = 2'-Omethylguanosine
  modified_base 50: mod_base = OTHER; note = 2'-Omethyladenosine

SEQ ID NO: 9349 - RNA, 76 nt, synthetic construct; identical to SEQ ID NO: 625
  source 1..76: mol_type = other RNA
  modified_base 2: mod_base = OTHER; note = Guanosine phosphorothiorate
  modified_base 3: mod_base = OTHER; note = 2'-Omethylcytosine phosphorothiorate
  modified_base 4: mod_base = OTHER; note = 2'-Omethyluridine
  modified_base 5: mod_base = OTHER; note = 2'-fluorocytosine
  modified_base 10: mod_base = OTHER; note = 2'-fluoroguanosine
  modified_base 12: mod_base = OTHER; note = 2'-fluoroguanosine
  modified_base 13: mod_base = OTHER; note = 2'-fluorocytosine
  modified_base 14: mod_base = OTHER; note = 2'-fluoroadenosine phosphorothiorate
  modified_base 15: mod_base = OTHER; note = 2'-Omethyladenosine
  modified_base 18: mod_base = OTHER; note = 2'-fluoroguanosine
  modified_base 20: mod_base = OTHER; note = Uridine phosphorothiorate
  modified_base 22: mod_base = OTHER; note = Guanosine phosphorothiorate
  modified_base 23: mod_base = OTHER; note = 2'-fluorocytosine phosphorothiorate
  modified_base 24: mod_base = OTHER; note = 2'-fluoroguanosine
  modified_base 27: mod_base = OTHER; note = Uridine phosphorothiorate
  modified_base 28: mod_base = OTHER; note = 2'-Omethyluridine
  modified_base 29: mod_base = OTHER; note = 2'-fluoroguanosine
  modified_base 30: mod_base = OTHER; note = 2'-Omethylguanosine
  modified_base 37: mod_base = OTHER; note = Adenosine phosphorothiorate
  modified_base 38: mod_base = OTHER; note = 2'-Omethyladenosine
  modified_base 41: mod_base = OTHER; note = Cytosine phosphorothiorate
  modified_base 42: mod_base = OTHER; note = 2'-fluoroadenosine phosphorothiorate
  modified_base 43: mod_base = OTHER; note = 2'-Omethyladenosine
  modified_base 46: mod_base = OTHER; note = 2'-fluoroguanosine
  modified_base 47: mod_base = OTHER; note = 2'-fluorouridine
  modified_base 49: mod_base = OTHER; note = Cytosine phosphorothiorate
  modified_base 50: mod_base = OTHER; note = 2'-Omethylcytosine phosphorothiorate
  modified_base 51: mod_base = OTHER; note = 2'-Omethylguanosine phosphorothiorate
  modified_base 52: mod_base = OTHER; note = 2'-fluoroguanosine
  modified_base 53: mod_base = OTHER; note = 2'-fluoroguanosine phosphorothiorate
  modified_base 57: mod_base = OTHER; note = 2'-Omethylguanosine
  modified_base 61: mod_base = OTHER; note = 2'-fluorocytosine
  modified_base 62: mod_base = OTHER; note = 2'-Omethylcytosine
  modified_base 74: mod_base = OTHER; note = Cytosine phosphorothiorate
  modified_base 75: mod_base = OTHER; note = 2'-fluorocytosine phosphorothiorate
  modified_base 76: mod_base = OTHER; note = 2'-fluoroadenosine

SEQ ID NO: 9350 - RNA, 76 nt, synthetic construct; identical to SEQ ID NO: 625
  source 1..76: mol_type = other RNA
  modified_base 1: mod_base = OTHER; note = 2'-Omethylguanosine phosphorothiorate
  modified_base 2: mod_base = OTHER; note = 2'-Omethylguanosine
  modified_base 25: mod_base = OTHER; note = 2'-Omethylcytosine
  modified_base 33: mod_base = OTHER; note = 2'-fluorouridine
  modified_base 37: mod_base = OTHER; note = Adenosine phosphorothiorate
  modified_base 52: mod_base = OTHER; note = 2'-Omethylguanosine
  modified_base 57: mod_base = OTHER; note = 2'-Omethylguanosine
  modified_base 62: mod_base = OTHER; note = 2'-Omethylcytosine
  modified_base 73: mod_base = OTHER; note = 2'-Omethylguanosine
  modified_base 75: mod_base = OTHER; note = 2'-fluorocytosine phosphorothiorate

SEQ ID NO: 9351 - RNA, 76 nt, synthetic construct; identical to SEQ ID NO: 3615
  source 1..76: mol_type = other RNA
  modified_base 1: mod_base = OTHER; note = 2'-Omethylguanosine phosphorothiorate
  modified_base 2: mod_base = OTHER; note = 2'-Omethylguanosine
  modified_base 3: mod_base = OTHER; note = 2'-Omethylcytosine
  modified_base 4: mod_base = OTHER; note = 2'-Omethyluridine
  modified_base 5: mod_base = OTHER; note = 2'-Omethylcytosine
  modified_base 6: mod_base = OTHER; note = 2'-Omethylcytosine
  modified_base 27: mod_base = OTHER; note = 2'-Omethyluridine
  modified_base 28: mod_base = OTHER; note = 2'-Omethyluridine
  modified_base 29: mod_base = OTHER; note = 2'-fluoroguanosine
  modified_base 30: mod_base = OTHER; note = 2'-Omethylguanosine
  modified_base 40: mod_base = OTHER; note = 2'-fluorouridine
  modified_base 41: mod_base = OTHER; note = 2'-Omethylcytosine
  modified_base 42: mod_base = OTHER; note = 2'-Omethyladenosine
  modified_base 43: mod_base = OTHER; note = 2'-Omethyladenosine
  modified_base 73: mod_base = OTHER; note = 2'-Omethylguanosine

SEQ ID NO: 9352 - RNA, 76 nt, synthetic construct; identical to SEQ ID NO: 625
  source 1..76: mol_type = other RNA
  modified_base 1: mod_base = OTHER; note = 2'-fluoroguanosine
  modified_base 8: mod_base = OTHER; note = Uridine phosphorothiorate
  modified_base 9: mod_base = OTHER; note = Guanosine phosphorothiorate
  modified_base 10: mod_base = OTHER; note = 2'-Omethylguanosine
  modified_base 12: mod_base = OTHER; note = 2'-Omethylguanosine
  modified_base 15: mod_base = OTHER; note = 2'-fluoroadenosine
  modified_base 21: mod_base = OTHER; note = Adenosine phosphorothiorate
  modified_base 23: mod_base = OTHER; note = 2'-fluorocytosine
  modified_base 24: mod_base = OTHER; note = Guanosine phosphorothiorate
  modified_base 26: mod_base = OTHER; note = 2'-Omethyladenosine
  modified_base 28: mod_base = OTHER; note = Uridine phosphorothiorate
  modified_base 29: mod_base = OTHER; note = 2'-fluoroguanosine
  modified_base 30: mod_base = OTHER; note = 2'-Omethylguanosine
  modified_base 34: mod_base = OTHER; note = 2'-fluorouridine phosphorothiorate
  modified_base 36: mod_base = OTHER; note = Adenosine phosphorothiorate
  modified_base 39: mod_base = OTHER; note = Uridine phosphorothiorate
  modified_base 40: mod_base = OTHER; note = 2'-Omethyluridine
  modified_base 42: mod_base = OTHER; note = 2'-Omethyladenosine
  modified_base 45: mod_base = OTHER; note = 2'-fluoroguanosine
  modified_base 46: mod_base = OTHER; note = 2'-fluoroguanosine
  modified_base 47: mod_base = OTHER; note = 2'-fluorouridine
  modified_base 48: mod_base = OTHER; note = 2'-fluorouridine
  modified_base 49: mod_base = OTHER; note = Cytosine phosphorothiorate
  modified_base 50: mod_base = OTHER; note = 2'-fluorocytosine
  modified_base 52: mod_base = OTHER; note = 2'-fluoroguanosine
  modified_base 53: mod_base = OTHER; note = 2'-fluoroguanosine
  modified_base 61: mod_base = OTHER; note = 2'-Omethylcytosine phosphorothiorate
  modified_base 70: mod_base = OTHER; note = 2'-fluoroguanosine
  modified_base 72: mod_base = OTHER; note = 2'-fluorocytosine
  modified_base 74: mod_base = OTHER; note = 2'-fluorocytosine
  modified_base 75: mod_base = OTHER; note = 2'-fluorocytosine
  modified_base 76: mod_base = OTHER; note = 2'-fluoroadenosine

SEQ ID NO: 9353 - RNA, 76 nt, synthetic construct; identical to SEQ ID NO: 625
  source 1..76: mol_type = other RNA
  modified_base 2: mod_base = OTHER; note = 2'-fluoroguanosine
  modified_base 4: mod_base = OTHER; note = 2'-Omethyluridine
  modified_base 6: mod_base = OTHER; note = 2'-Omethylcytosine
  modified_base 9: mod_base = OTHER; note = Guanosine phosphorothiorate
  modified_base 10: mod_base = OTHER; note = 2'-Omethylguanosine
  modified_base 12: mod_base = OTHER; note = 2'-Omethylguanosine
  modified_base 15: mod_base = OTHER; note = Adenosine phosphorothiorate
  modified_base 20: mod_base = OTHER; note = 2'-Omethyluridine
  modified_base 22: mod_base = OTHER; note = Guanosine phosphorothiorate
  modified_base 25: mod_base = OTHER; note = 2'-fluorocytosine
  modified_base 26: mod_base = OTHER; note = Adenosine phosphorothiorate
  modified_base 27: mod_base = OTHER; note = 2'-Omethyluridine
  modified_base 28: mod_base = OTHER; note = 2'-Omethyluridine
  modified_base 29: mod_base = OTHER; note = 2'-fluoroguanosine
  modified_base 31: mod_base = OTHER; note = 2'-fluoroadenosine
  modified_base 34: mod_base = OTHER; note = 2'-Omethyluridine
  modified_base 40: mod_base = OTHER; note = 2'-Omethyluridine
  modified_base 43: mod_base = OTHER; note = Adenosine phosphorothiorate
  modified_base 44: mod_base = OTHER; note = Adenosine phosphorothiorate
  modified_base 45: mod_base = OTHER; note = 2'-fluoroguanosine
  modified_base 46: mod_base = OTHER; note = 2'-fluoroguanosine
  modified_base 47: mod_base = OTHER; note = 2'-Omethyluridine phosphorothiorate
  modified_base 49: mod_base = OTHER; note = 2'-fluorocytosine phosphorothiorate
  modified_base 51: mod_base = OTHER; note = Guanosine phosphorothiorate
  modified_base 53: mod_base = OTHER; note = 2'-fluoroguanosine
  modified_base 56: mod_base = OTHER; note = Cytosine phosphorothiorate
  modified_base 57: mod_base = OTHER; note = 2'-fluoroguanosine
  modified_base 63: mod_base = OTHER; note = 2'-Omethylcytosine
  modified_base 66: mod_base = OTHER; note = 2'-fluorocytosine
  modified_base 67: mod_base = OTHER; note = Guanosine phosphorothiorate
  modified_base 68: mod_base = OTHER; note = 2'-fluoroguanosine
  modified_base 70: mod_base = OTHER; note = Guanosine phosphorothiorate
  modified_base 73: mod_base = OTHER; note = 2'-Omethylguanosine

SEQ ID NO: 9354 - RNA, 85 nt, synthetic construct; identical to SEQ ID NO: 3317
  source 1..85: mol_type = other RNA
  modified_base 1: mod_base = OTHER; note = 2'-Omethylguanosine phosphorothiorate
  modified_base 2: mod_base = OTHER; note = Cytosine phosphorothiorate
  modified_base 3: mod_base = OTHER; note = 2'-Omethyluridine phosphorothiorate
  modified_base 4: mod_base = OTHER; note = 2'-Omethylguanosine phosphorothiorate
  modified_base 14: mod_base = OTHER; note = 2'-fluoroadenosine phosphorothiorate
  modified_base 21: mod_base = OTHER; note = Adenosine phosphorothiorate
  modified_base 22: mod_base = OTHER; note = 2'-Omethyladenosine
  modified_base 27: mod_base = OTHER; note = 2'-fluorouridine
  modified_base 29: mod_base = OTHER; note = Guanosine phosphorothiorate
  modified_base 37: mod_base = OTHER; note = 2'-fluoroadenosine
  modified_base 41: mod_base = OTHER; note = 2'-fluorocytosine phosphorothiorate
  modified_base 45: mod_base = OTHER; note = 2'-Omethylguanosine phosphorothiorate
  modified_base 56: mod_base = OTHER; note = 2'-fluoroguanosine
  modified_base 57: mod_base = OTHER; note = 2'-fluorocytosine
  modified_base 61: mod_base = OTHER; note = 2'-Omethylguanosine
  modified_base 71: mod_base = OTHER; note = 2'-fluorocytosine
  modified_base 80: mod_base = OTHER; note = 2'-Omethylguanosine phosphorothiorate
  modified_base 82: mod_base = OTHER; note = 2'-fluoroguanosine phosphorothiorate

SEQ ID NO: 9355 - RNA, 85 nt, synthetic construct; identical to SEQ ID NO: 3317
  source 1..85: mol_type = other RNA
  modified_base 1: mod_base = OTHER; note = 2'-Omethylguanosine phosphorothiorate
  modified_base 2: mod_base = OTHER; note = 2'-Omethylcytosine
  modified_base 3: mod_base = OTHER; note = 2'-Omethyluridine phosphorothiorate
  modified_base 4: mod_base = OTHER; note = 2'-Omethylguanosine
  modified_base 16: mod_base = OTHER; note = 2'-fluorouridine
  modified_base 18: mod_base = OTHER; note = Guanosine phosphorothiorate
  modified_base 26: mod_base = OTHER; note = Guanosine phosphorothiorate
  modified_base 34: mod_base = OTHER; note = 2'-Omethylcytosine
  modified_base 36: mod_base = OTHER; note = Adenosine phosphorothiorate
  modified_base 44: mod_base = OTHER; note = 2'-Omethyluridine
  modified_base 48: mod_base = OTHER; note = 2'-fluoroguanosine phosphorothiorate
  modified_base 49: mod_base = OTHER; note = 2'-fluorouridine
  modified_base 57: mod_base = OTHER; note = 2'-fluorocytosine
  modified_base 58: mod_base = OTHER; note = 2'-fluoroguanosine
  modified_base 60: mod_base = OTHER; note = 2'-Omethyladenosine phosphorothiorate
  modified_base 64: mod_base = OTHER; note = 2'-Omethyluridine phosphorothiorate
  modified_base 71: mod_base = OTHER; note = Cytosine phosphorothiorate
  modified_base 73: mod_base = OTHER; note = 2'-fluoroguanosine
  modified_base 81: mod_base = OTHER; note = 2'-fluorocytosine
  modified_base 82: mod_base = OTHER; note = 2'-Omethylguanosine
  modified_base 84: mod_base = OTHER; note = 2'-fluorocytosine

SEQ ID NO: 9356 - RNA, 76 nt, synthetic construct; identical to SEQ ID NO: 625
  source 1..76: mol_type = other RNA
  modified_base 1: mod_base = OTHER; note = 2'-Omethylguanosine
  modified_base 10: mod_base = OTHER; note = 2'-Omethylguanosine
  modified_base 13: mod_base = OTHER; note = 2'-Omethylcytosine
  modified_base 17: mod_base = OTHER; note = Guanosine phosphorothiorate
  modified_base 18: mod_base = OTHER; note = 2'-Omethylguanosine
  modified_base 19: mod_base = OTHER; note = Adenosine phosphorothiorate
  modified_base 20: mod_base = OTHER; note = 2'-Omethyluridine
  modified_base 25: mod_base = OTHER; note = 2'-Omethylcytosine
  modified_base 33: mod_base = OTHER; note = 2'-fluorouridine
  modified_base 35: mod_base = OTHER; note = Cytosine phosphorothiorate
  modified_base 37: mod_base = OTHER; note = Adenosine phosphorothiorate
  modified_base 38: mod_base = OTHER; note = Adenosine phosphorothiorate
  modified_base 41: mod_base = OTHER; note = 2'-fluorocytosine phosphorothiorate
  modified_base 43: mod_base = OTHER; note = 2'-Omethyladenosine
  modified_base 44: mod_base = OTHER; note = 2'-fluoroadenosine
  modified_base 50: mod_base = OTHER; note = 2'-Omethylcytosine
  modified_base 52: mod_base = OTHER; note = 2'-Omethylguanosine
  modified_base 54: mod_base = OTHER; note = Uridine phosphorothiorate
  modified_base 55: mod_base = OTHER; note = Uridine phosphorothiorate
  modified_base 56: mod_base = OTHER; note = 2'-Omethylcytosine
  modified_base 57: mod_base = OTHER; note = Guanosine phosphorothiorate
  modified_base 62: mod_base = OTHER; note = 2'-Omethylcytosine
  modified_base 63: mod_base = OTHER; note = 2'-fluorocytosine
  modified_base 65: mod_base = OTHER; note = 2'-Omethylguanosine
  modified_base 71: mod_base = OTHER; note = 2'-Omethyluridine
  modified_base 73: mod_base = OTHER; note = 2'-Omethylguanosine

SEQ ID NO: 9357 - RNA, 75 nt, synthetic construct; identical to SEQ ID NO: 1045
  source 1..75: mol_type = other RNA
  modified_base 1: mod_base = OTHER; note = 2'-Omethylguanosine phosphorothiorate
  modified_base 4: mod_base = OTHER; note = 2'-fluorouridine phosphorothiorate
  modified_base 28: mod_base = OTHER; note = 2'-Omethyluridine
  modified_base 43: mod_base = OTHER; note = 2'-fluoroguanosine
  modified_base 46: mod_base = OTHER; note = 2'-fluoroadenosine
  modified_base 55: mod_base = OTHER; note = 2'-fluorocytosine
  modified_base 60: mod_base = OTHER; note = 2'-fluorocytosine
  modified_base 61: mod_base = OTHER; note = 2'-fluorouridine
  modified_base 73: mod_base = OTHER; note = 2'-fluorocytosine phosphorothiorate

SEQ ID NO: 9358 - RNA, 76 nt, synthetic construct; identical to SEQ ID NO: 625
  source 1..76: mol_type = other RNA
  modified_base 1: mod_base = OTHER; note = 2'-Omethylguanosine phosphorothiorate
  modified_base 2: mod_base = OTHER; note = 2'-Omethylguanosine
  modified_base 13: mod_base = OTHER; note = 2'-Omethylcytosine
  modified_base 33: mod_base = OTHER; note = 2'-fluorouridine
  modified_base 35: mod_base = OTHER; note = Cytosine phosphorothiorate
  modified_base 37: mod_base = OTHER; note = Adenosine phosphorothiorate
  modified_base 38: mod_base = OTHER; note = Adenosine phosphorothiorate
  modified_base 52: mod_base = OTHER; note = 2'-fluoroguanosine
  modified_base 57: mod_base = OTHER; note = 2'-Omethylguanosine
  modified_base 73: mod_base = OTHER; note = 2'-Omethylguanosine
  modified_base 75: mod_base = OTHER; note = 2'-fluorocytosine phosphorothiorate

SEQ ID NO: 9359 - RNA, 76 nt, synthetic construct; identical to SEQ ID NO: 625
  source 1..76: mol_type = other RNA
  modified_base 22: mod_base = OTHER; note = 2'-fluoroguanosine
  modified_base 23: mod_base = OTHER; note = 2'-fluorocytosine
  modified_base 24: mod_base = OTHER; note = 2'-fluoroguanosine
  modified_base 25: mod_base = OTHER; note = 2'-fluorocytosine

SEQ ID NO: 9360 - RNA, 76 nt, synthetic construct; identical to SEQ ID NO: 625
  source 1..76: mol_type = other RNA
  modified_base 5: mod_base = OTHER; note = 2'-fluorocytosine
  modified_base 6: mod_base = OTHER; note = 2'-fluorocytosine
  modified_base 11: mod_base = OTHER; note = Cytosine phosphorothiorate
  modified_base 15: mod_base = OTHER; note = 2'-fluoroadenosine
  modified_base 16: mod_base = OTHER; note = 2'-fluorouridine
  modified_base 17: mod_base = OTHER; note = Guanosine phosphorothiorate
  modified_base 18: mod_base = OTHER; note = 2'-fluoroguanosine
  modified_base 20: mod_base = OTHER; note = 2'-fluorouridine
  modified_base 21: mod_base = OTHER; note = Adenosine phosphorothiorate
  modified_base 22: mod_base = OTHER; note = 2'-Omethylguanosine phosphorothiorate
  modified_base 23: mod_base = OTHER; note = 2'-fluorocytosine
  modified_base 25: mod_base = OTHER; note = 2'-Omethylcytosine
  modified_base 26: mod_base = OTHER; note = 2'-Omethyladenosine
  modified_base 28: mod_base = OTHER; note = Uridine phosphorothiorate
  modified_base 29: mod_base = OTHER; note = 2'-fluoroguanosine
  modified_base 30: mod_base = OTHER; note = Guanosine phosphorothiorate
  modified_base 37: mod_base = OTHER; note = Adenosine phosphorothiorate
  modified_base 38: mod_base = OTHER; note = 2'-fluoroadenosine phosphorothiorate
  modified_base 42: mod_base = OTHER; note = 2'-Omethyladenosine
  modified_base 43: mod_base = OTHER; note = 2'-Omethyladenosine
  modified_base 44: mod_base = OTHER; note = 2'-Omethyladenosine phosphorothiorate
  modified_base 50: mod_base = OTHER; note = Cytosine phosphorothiorate
  modified_base 54: mod_base = OTHER; note = 2'-fluorouridine
  modified_base 57: mod_base = OTHER; note = Guanosine phosphorothiorate
  modified_base 58: mod_base = OTHER; note = Adenosine phosphorothiorate
  modified_base 59: mod_base = OTHER; note = 2'-fluoroguanosine
  modified_base 63: mod_base = OTHER; note = 2'-fluorocytosine phosphorothiorate
  modified_base 65: mod_base = OTHER; note = 2'-Omethylguanosine
  modified_base 66: mod_base = OTHER; note = 2'-Omethylcytosine phosphorothiorate
  modified_base 67: mod_base = OTHER; note = 2'-fluoroguanosine
  modified_base 68: mod_base = OTHER; note = 2'-fluoroguanosine
  modified_base 71: mod_base = OTHER; note = 2'-fluorouridine
  modified_base 74: mod_base = OTHER; note = 2'-Omethylcytosine
  modified_base 75: mod_base = OTHER; note = 2'-Omethylcytosine

SEQ ID NO: 9361 - RNA, 75 nt, synthetic construct; identical to SEQ ID NO: 3311
  source 1..75: mol_type = other RNA
  modified_base 1: mod_base = OTHER; note = 2'-Omethylguanosine phosphorothiorate
  modified_base 2: mod_base = OTHER; note = 2'-Omethylguanosine
  modified_base 12: mod_base = OTHER; note = 2'-Omethylguanosine
  modified_base 13: mod_base = OTHER; note = Uridine phosphorothiorate
  modified_base 22: mod_base = OTHER; note = 2'-fluoroguanosine
  modified_base 23: mod_base = OTHER; note = 2'-fluorocytosine
  modified_base 27: mod_base = OTHER; note = Cytosine phosphorothiorate
  modified_base 28: mod_base = OTHER; note = 2'-fluorouridine
  modified_base 40: mod_base = OTHER; note = Cytosine phosphorothiorate
  modified_base 41: mod_base = OTHER; note = 2'-fluorocytosine
  modified_base 46: mod_base = OTHER; note = 2'-fluoroadenosine
  modified_base 55: mod_base = OTHER; note = 2'-Omethylcytosine
  modified_base 63: mod_base = OTHER; note = Guanosine phosphorothiorate
  modified_base 64: mod_base = OTHER; note = Guanosine phosphorothiorate
  modified_base 67: mod_base = OTHER; note = 2'-fluoroguanosine
  modified_base 73: mod_base = OTHER; note = Cytosine phosphorothiorate
  modified_base 74: mod_base = OTHER; note = 2'-Omethylcytosine

SEQ ID NO: 9362 - DNA, 76 bp, synthetic construct; identical to SEQ ID NO: 1924
  source 1..76: mol_type = other DNA
  modified_base 1: mod_base = OTHER; note = 2'-Omethylguanosine phosphorothiorate
  modified_base 2: mod_base = OTHER; note = 2'-Omethylguanosine
  modified_base 3: mod_base = OTHER; note = 2'-Omethylcytosine
  modified_base 4: mod_base = OTHER; note = 2'-Omethyluridine
  modified_base 5: mod_base = OTHER; note = 2'-Omethylcytosine
  modified_base 6: mod_base = OTHER; note = 2'-Omethylcytosine
  modified_base 43: mod_base = OTHER; note = 2'-Omethyladenosine
  modified_base 44: mod_base = OTHER; note = 2'-Omethyladenosine
  modified_base 45: mod_base = OTHER; note = 2'-Omethylguanosine
  modified_base 46: mod_base = OTHER; note = 2'-fluoroguanosine
  modified_base 48: mod_base = OTHER; note = 2'-fluorouridine
  modified_base 49: mod_base = OTHER; note = 2'-Omethylcytosine
  modified_base 73: mod_base = OTHER; note = 2'-Omethylguanosine
  misc_feature 1..46: note = RNA
  misc_feature 47: note = DNA
  misc_feature 48..76: note = RNA

SEQ ID NO: 9363 - RNA, 75 nt, synthetic construct; identical to SEQ ID NO: 1045
  source 1..75: mol_type = other RNA
  modified_base 1: mod_base = OTHER; note = 2'-Omethylguanosine phosphorothiorate
  modified_base 2: mod_base = OTHER; note = 2'-Omethylguanosine phosphorothiorate
  modified_base 3: mod_base = OTHER; note = 2'-Omethyluridine
  modified_base 4: mod_base = OTHER; note = 2'-Omethyluridine
  modified_base 5: mod_base = OTHER; note = 2'-Omethylcytosine
  modified_base 6: mod_base = OTHER; note = 2'-Omethylcytosine
  modified_base 14: mod_base = OTHER; note = 2'-Omethyladenosine
  modified_base 17: mod_base = OTHER; note = 2'-Omethylguanosine
  modified_base 18: mod_base = OTHER; note = 2'-Omethylguanosine
  modified_base 20: mod_base = OTHER; note = 2'-Omethyladenosine
  modified_base 22: mod_base = OTHER; note = 2'-Omethylguanosine
  modified_base 25: mod_base = OTHER; note = 2'-Omethylcytosine
  modified_base 27: mod_base = OTHER; note = 2'-Omethylcytosine
  modified_base 33: mod_base = OTHER; note = 2'-fluorouridine
  modified_base 41: mod_base = OTHER; note = 2'-Omethylcytosine
  modified_base 44: mod_base = OTHER; note = 2'-Omethylcytosine
  modified_base 45: mod_base = OTHER; note = 2'-Omethylguanosine
  modified_base 46: mod_base = OTHER; note = 2'-fluoroadenosine
  modified_base 47: mod_base = OTHER; note = 2'-fluorouridine
  modified_base 51: mod_base = OTHER; note = 2'-Omethyladenosine
  modified_base 54: mod_base = OTHER; note = Uridine phosphorothiorate
  modified_base 70: mod_base = OTHER; note = 2'-Omethylcytosine
  modified_base 72: mod_base = OTHER; note = 2'-Omethyluridine

SEQ ID NO: 9364 - RNA, 76 nt, synthetic construct; identical to SEQ ID NO: 3447
  source 1..76: mol_type = other RNA

SEQ ID NO: 9365 - RNA, 75 nt, synthetic construct; identical to SEQ ID NO: 3306
  source 1..75: mol_type = other RNA
  modified_base 1: mod_base = OTHER; note = 2'-Omethylguanosine
  modified_base 16: mod_base = OTHER; note = 2'-Omethylcytosine
  modified_base 17: mod_base = OTHER; note = 2'-Omethylguanosine
  modified_base 18: mod_base = OTHER; note = 2'-Omethylguanosine
  modified_base 53: mod_base = OTHER; note = 2'-Omethyluridine
  modified_base 55: mod_base = OTHER; note = 2'-Omethylcytosine
  modified_base 56: mod_base = OTHER; note = 2'-Omethyladenosine
  modified_base 58: mod_base = OTHER; note = 2'-Omethyladenosine
  modified_base 72: mod_base = OTHER; note = 2'-Omethyladenosine

SEQ ID NO: 9366 - RNA, 73 nt, synthetic construct; identical to SEQ ID NO: 935
  source 1..73: mol_type = other RNA
  modified_base 1: mod_base = OTHER; note = 2'-Omethylguanosine phosphorothiorate
  modified_base 2: mod_base = OTHER; note = 2'-Omethylguanosine phosphorothiorate
  modified_base 72: mod_base = OTHER; note = 2'-Omethylcytosine

SEQ ID NO: 9367 - RNA, 75 nt, synthetic construct; identical to SEQ ID NO: 3311
  source 1..75: mol_type = other RNA
  modified_base 1: mod_base = OTHER; note = Guanosine phosphorothiorate
  modified_base 3: mod_base = OTHER; note = 2'-Omethyluridine
  modified_base 19: mod_base = OTHER; note = 2'-fluorouridine
  modified_base 20: mod_base = OTHER; note = 2'-Omethyladenosine
  modified_base 39: mod_base = OTHER; note = 2'-fluorouridine
  modified_base 56: mod_base = OTHER; note = 2'-fluoroguanosine
  modified_base 57: mod_base = OTHER; note = 2'-Omethyladenosine
  modified_base 73: mod_base = OTHER; note = 2'-fluorocytosine phosphorothiorate

SEQ ID NO: 9368 - RNA, 75 nt, synthetic construct; identical to SEQ ID NO: 1045
  source 1..75: mol_type = other RNA
  modified_base 2: mod_base = OTHER; note = 2'-Omethylguanosine phosphorothiorate
  modified_base 5: mod_base = OTHER; note = Cytosine phosphorothiorate
  modified_base 15: mod_base = OTHER; note = 2'-Omethyladenosine phosphorothiorate
  modified_base 16: mod_base = OTHER; note = 2'-Omethyluridine phosphorothiorate
  modified_base 17: mod_base = OTHER; note = 2'-fluoroguanosine phosphorothiorate
  modified_base 29: mod_base = OTHER; note = 2'-Omethylguanosine
  modified_base 31: mod_base = OTHER; note = 2'-fluoroadenosine
  modified_base 40: mod_base = OTHER; note = 2'-Omethylcytosine
  modified_base 41: mod_base = OTHER; note = 2'-fluorocytosine
  modified_base 42: mod_base = OTHER; note = 2'-Omethyladenosine
  modified_base 45: mod_base = OTHER; note = 2'-Omethylguanosine
  modified_base 54: mod_base = OTHER; note = 2'-Omethyluridine phosphorothiorate
  modified_base 66: mod_base = OTHER; note = 2'-Omethylguanosine
  modified_base 67: mod_base = OTHER; note = 2'-Omethylguanosine
  modified_base 68: mod_base = OTHER; note = Adenosine phosphorothiorate
  modified_base 72: mod_base = OTHER; note = 2'-Omethyluridine
  modified_base 74: mod_base = OTHER; note = 2'-Omethylcytosine phosphorothiorate

SEQ ID NO: 9369 - RNA, 85 nt, synthetic construct; identical to SEQ ID NO: 3297
  source 1..85: mol_type = other RNA
  modified_base 1: mod_base = OTHER; note = 2'-Omethylguanosine phosphorothiorate
  modified_base 2: mod_base = OTHER; note = 2'-Omethylcytosine phosphorothiorate
  modified_base 3: mod_base = OTHER; note = 2'-Omethyluridine
  modified_base 4: mod_base = OTHER; note = 2'-Omethylguanosine
  modified_base 5: mod_base = OTHER; note = 2'-Omethyluridine
  modified_base 6: mod_base = OTHER; note = 2'-Omethylguanosine
  modified_base 10: mod_base = OTHER; note = 2'-Omethylguanosine
  modified_base 11: mod_base = OTHER; note = 2'-Omethylcytosine
  modified_base 12: mod_base = OTHER; note = 2'-Omethylcytosine
  modified_base 13: mod_base = OTHER; note = 2'-Omethylguanosine
  modified_base 17: mod_base = OTHER; note = Guanosine phosphorothiorate
  modified_base 18: mod_base = OTHER; note = 2'-Omethylguanosine
  modified_base 19: mod_base = OTHER; note = Uridine phosphorothiorate
  modified_base 20: mod_base = OTHER; note = 2'-Omethyluridine
  modified_base 22: mod_base = OTHER; note = 2'-Omethyladenosine
  modified_base 23: mod_base = OTHER; note = 2'-Omethylguanosine
  modified_base 24: mod_base = OTHER; note = 2'-Omethylguanosine
  modified_base 25: mod_base = OTHER; note = 2'-Omethylcytosine
  modified_base 29: mod_base = OTHER; note = 2'-Omethylguanosine
  modified_base 33: mod_base = OTHER; note = 2'-fluorouridine
  modified_base 35: mod_base = OTHER; note = Cytosine phosphorothiorate
  modified_base 37: mod_base = OTHER; note = Adenosine phosphorothiorate
  modified_base 38: mod_base = OTHER; note = Adenosine phosphorothiorate
  modified_base 41: mod_base = OTHER; note = 2'-fluorocytosine phosphorothiorate
  modified_base 43: mod_base = OTHER; note = 2'-Omethyladenosine
  modified_base 44: mod_base = OTHER; note = 2'-fluorouridine
  modified_base 56: mod_base = OTHER; note = Guanosine phosphorothiorate
  modified_base 58: mod_base = OTHER; note = 2'-Omethylguanosine
  modified_base 59: mod_base = OTHER; note = 2'-Omethylcytosine
  modified_base 60: mod_base = OTHER; note = 2'-Omethyladenosine
  modified_base 61: mod_base = OTHER; note = 2'-Omethylguanosine
  modified_base 62: mod_base = OTHER; note = 2'-Omethylguanosine
  modified_base 63: mod_base = OTHER; note = Uridine phosphorothiorate
  modified_base 64: mod_base = OTHER; note = Uridine phosphorothiorate
  modified_base 65: mod_base = OTHER; note = 2'-Omethylcytosine
  modified_base 66: mod_base = OTHER; note = Guanosine phosphorothiorate
  modified_base 70: mod_base = OTHER; note = 2'-Omethylcytosine
  modified_base 71: mod_base = OTHER; note = 2'-Omethylcytosine
  modified_base 72: mod_base = OTHER; note = 2'-fluorouridine
  modified_base 73: mod_base = OTHER; note = 2'-Omethylguanosine
  modified_base 74: mod_base = OTHER; note = 2'-Omethylcytosine
  modified_base 75: mod_base = OTHER; note = 2'-Omethyluridine
  modified_base 76: mod_base = OTHER; note = 2'-Omethylcytosine
  modified_base 77: mod_base = OTHER; note = 2'-Omethyladenosine
  modified_base 80: mod_base = OTHER; note = 2'-Omethylguanosine
  modified_base 82: mod_base = OTHER; note = 2'-Omethylguanosine

SEQ ID NO: 9370 - RNA, 73 nt, synthetic construct; identical to SEQ ID NO: 935
  source 1..73: mol_type = other RNA
  modified_base 1: mod_base = OTHER; note = 2'-Omethylguanosine phosphorothiorate
  modified_base 2: mod_base = OTHER; note = 2'-Omethylguanosine
  modified_base 22: mod_base = OTHER; note = 2'-Omethylguanosine
  modified_base 52: mod_base = OTHER; note = 2'-Omethylguanosine

SEQ ID NO: 9371 - RNA, 76 nt, synthetic construct; identical to SEQ ID NO: 3318
  source 1..76: mol_type = other RNA
  modified_base 1: mod_base = OTHER; note = 2'-Omethylcytosine
  modified_base 2: mod_base = OTHER; note = 2'-Omethylcytosine
  modified_base 3: mod_base = OTHER; note = 2'-Omethyluridine
  modified_base 4: mod_base = OTHER; note = 2'-Omethyluridine
  modified_base 5: mod_base = OTHER; note = 2'-Omethylcytosine
  modified_base 6: mod_base = OTHER; note = 2'-Omethylguanosine
  modified_base 13: mod_base = OTHER; note = 2'-Omethylcytosine
  modified_base 14: mod_base = OTHER; note = 2'-Omethyladenosine
  modified_base 15: mod_base = OTHER; note = 2'-Omethylguanosine
  modified_base 16: mod_base = OTHER; note = 2'-Omethyluridine
  modified_base 18: mod_base = OTHER; note = 2'-Omethylguanosine
  modified_base 19: mod_base = OTHER; note = 2'-Omethylguanosine
  modified_base 20: mod_base = OTHER; note = Uridine phosphorothiorate
  modified_base 21: mod_base = OTHER; note = Adenosine phosphorothiorate
  modified_base 25: mod_base = OTHER; note = 2'-Omethylcytosine
  modified_base 33: mod_base = OTHER; note = Uridine phosphorothiorate
  modified_base 34: mod_base = OTHER; note = 2'-Omethylcytosine
  modified_base 35: mod_base = OTHER; note = Uridine phosphorothiorate
  modified_base 37: mod_base = OTHER; note = Guanosine phosphorothiorate
  modified_base 38: mod_base = OTHER; note = Adenosine phosphorothiorate
  modified_base 49: mod_base = OTHER; note = 2'-Omethylguanosine
  modified_base 50: mod_base = OTHER; note = 2'-Omethylcytosine
  modified_base 52: mod_base = OTHER; note = 2'-Omethylguanosine
  modified_base 54: mod_base = OTHER; note = Uridine phosphorothiorate
  modified_base 55: mod_base = OTHER; note = Uridine phosphorothiorate
  modified_base 61: mod_base = OTHER; note = 2'-Omethylcytosine
  modified_base 65: mod_base = OTHER; note = 2'-Omethylcytosine
  modified_base 73: mod_base = OTHER; note = 2'-Omethyladenosine

SEQ ID NO: 9372 - RNA, 75 nt, synthetic construct; identical to SEQ ID NO: 3336
  source 1..75: mol_type = other RNA
  modified_base 1: mod_base = OTHER; note = 2'-fluorocytosine phosphorothiorate
  modified_base 13: mod_base = OTHER; note = 2'-fluoroadenosine
  modified_base 20: mod_base = OTHER; note = 2'-fluoroadenosine
  modified_base 42: mod_base = OTHER; note = 2'-fluoroadenosine phosphorothiorate
  modified_base 63: mod_base = OTHER; note = 2'-Omethyluridine phosphorothiorate
  modified_base 71: mod_base = OTHER; note = Cytosine phosphorothiorate

SEQ ID NO: 9373 - RNA, 76 nt, synthetic construct; identical to SEQ ID NO: 625
  source 1..76: mol_type = other RNA
  modified_base 1: mod_base = OTHER; note = 2'-fluoroguanosine
  modified_base 5: mod_base = OTHER; note = 2'-Omethylcytosine phosphorothiorate
  modified_base 6: mod_base = OTHER; note = 2'-fluorocytosine
  modified_base 10: mod_base = OTHER; note = Guanosine phosphorothiorate
  modified_base 15: mod_base = OTHER; note = 2'-fluoroadenosine
  modified_base 16: mod_base = OTHER; note = 2'-fluorouridine phosphorothiorate
  modified_base 20: mod_base = OTHER; note = Uridine phosphorothiorate
  modified_base 22: mod_base = OTHER; note = 2'-fluoroguanosine
  modified_base 24: mod_base = OTHER; note = 2'-Omethylguanosine
  modified_base 25: mod_base = OTHER; note = 2'-fluorocytosine
  modified_base 26: mod_base = OTHER; note = 2'-Omethyladenosine
  modified_base 27: mod_base = OTHER; note = Uridine phosphorothiorate
  modified_base 37: mod_base = OTHER; note = Adenosine phosphorothiorate
  modified_base 38: mod_base = OTHER; note = 2'-Omethyladenosine
  modified_base 40: mod_base = OTHER; note = 2'-fluorouridine
  modified_base 41: mod_base = OTHER; note = 2'-fluorocytosine
  modified_base 42: mod_base = OTHER; note = 2'-Omethyladenosine
  modified_base 43: mod_base = OTHER; note = 2'-fluoroadenosine
  modified_base 44: mod_base = OTHER; note = 2'-Omethyladenosine
  modified_base 46: mod_base = OTHER; note = 2'-Omethylguanosine
  modified_base 50: mod_base = OTHER; note = 2'-Omethylcytosine
  modified_base 51: mod_base = OTHER; note = 2'-Omethylguanosine
  modified_base 52: mod_base = OTHER; note = 2'-fluoroguanosine
  modified_base 53: mod_base = OTHER; note = 2'-fluoroguanosine
  modified_base 57: mod_base = OTHER; note = 2'-fluoroguanosine
  modified_base 59: mod_base = OTHER; note = 2'-Omethylguanosine
  modified_base 61: mod_base = OTHER; note = 2'-Omethylcytosine phosphorothiorate
  modified_base 62: mod_base = OTHER; note = 2'-fluorocytosine phosphorothiorate
  modified_base 63: mod_base = OTHER; note = 2'-fluorocytosine
  modified_base 65: mod_base = OTHER; note = 2'-Omethylguanosine
  modified_base 66: mod_base = OTHER; note = 2'-Omethylcytosine
  modified_base 68: mod_base = OTHER; note = Guanosine phosphorothiorate
  modified_base 69: mod_base = OTHER; note = 2'-Omethyladenosine
  modified_base 70: mod_base = OTHER; note = Guanosine phosphorothiorate
  modified_base 71: mod_base = OTHER; note = 2'-Omethyluridine phosphorothiorate
  modified_base 72: mod_base = OTHER; note = 2'-fluorocytosine phosphorothiorate
  modified_base 73: mod_base = OTHER; note = 2'-Omethylguanosine
  modified_base 74: mod_base = OTHER; note = 2'-Omethylcytosine

SEQ ID NO: 9374 - RNA, 85 nt, synthetic construct; identical to SEQ ID NO: 3317
  source 1..85: mol_type = other RNA
  modified_base 1: mod_base = OTHER; note = 2'-Omethylguanosine phosphorothiorate
  modified_base 2: mod_base = OTHER; note = 2'-Omethylcytosine
  modified_base 5: mod_base = OTHER; note = 2'-Omethyluridine phosphorothiorate
  modified_base 13: mod_base = OTHER; note = 2'-fluoroguanosine
  modified_base 18: mod_base = OTHER; note = 2'-Omethylguanosine phosphorothiorate
  modified_base 23: mod_base = OTHER; note = Guanosine phosphorothiorate
  modified_base 24: mod_base = OTHER; note = 2'-fluoroguanosine
  modified_base 25: mod_base = OTHER; note = 2'-Omethylcytosine
  modified_base 36: mod_base = OTHER; note = Adenosine phosphorothiorate
  modified_base 40: mod_base = OTHER; note = Cytosine phosphorothiorate
  modified_base 42: mod_base = OTHER; note = 2'-fluoroadenosine
  modified_base 47: mod_base = OTHER; note = 2'-Omethylguanosine
  modified_base 48: mod_base = OTHER; note = 2'-fluoroguanosine
  modified_base 54: mod_base = OTHER; note = 2'-Omethylcytosine phosphorothiorate
  modified_base 56: mod_base = OTHER; note = Guanosine phosphorothiorate
  modified_base 57: mod_base = OTHER; note = Cytosine phosphorothiorate
  modified_base 59: mod_base = OTHER; note = 2'-Omethylcytosine
  modified_base 81: mod_base = OTHER; note = 2'-Omethylcytosine phosphorothiorate

SEQ ID NO: 9375 - RNA, 85 nt, synthetic construct; identical to SEQ ID NO: 3286
  source 1..85: mol_type = other RNA
  modified_base 1: mod_base = OTHER; note = 2'-Omethylcytosine
  modified_base 16: mod_base = OTHER; note = 2'-fluoroguanosine phosphorothiorate
  modified_base 25: mod_base = OTHER; note = 2'-fluoroguanosine
  modified_base 28: mod_base = OTHER; note = 2'-fluoroguanosine
  modified_base 30: mod_base = OTHER; note = 2'-fluoroadenosine
  modified_base 37: mod_base = OTHER; note = 2'-Omethyladenosine
  modified_base 46: mod_base = OTHER; note = 2'-fluoroadenosine phosphorothiorate
  modified_base 48: mod_base = OTHER; note = 2'-Omethyladenosine
  modified_base 51: mod_base = OTHER; note = 2'-Omethyluridine
  modified_base 53: mod_base = OTHER; note = 2'-Omethyluridine
  modified_base 55: mod_base = OTHER; note = Cytosine phosphorothiorate
  modified_base 57: mod_base = OTHER; note = 2'-Omethylcytosine
  modified_base 69: mod_base = OTHER; note = 2'-fluorocytosine phosphorothiorate
  modified_base 84: mod_base = OTHER; note = Cytosine phosphorothiorate
  modified_base 85: mod_base = OTHER; note = 2'-fluoroadenosine

SEQ ID NO: 9376 - RNA, 75 nt, synthetic construct; identical to SEQ ID NO: 3336
  source 1..75: mol_type = other RNA
  modified_base 6: mod_base = OTHER; note = 2'-Omethylguanosine phosphorothiorate
  modified_base 10: mod_base = OTHER; note = Cytosine phosphorothiorate
  modified_base 11: mod_base = OTHER; note = 2'-fluorouridine phosphorothiorate
  modified_base 18: mod_base = OTHER; note = 2'-fluoroguanosine phosphorothiorate
  modified_base 19: mod_base = OTHER; note = 2'-fluorouridine
  modified_base 20: mod_base = OTHER; note = 2'-fluoroadenosine
  modified_base 25: mod_base = OTHER; note = 2'-fluoroadenosine
  modified_base 26: mod_base = OTHER; note = 2'-fluorouridine phosphorothiorate
  modified_base 27: mod_base = OTHER; note = Cytosine phosphorothiorate
  modified_base 29: mod_base = OTHER; note = 2'-Omethylguanosine
  modified_base 36: mod_base = OTHER; note = 2'-fluoroadenosine
  modified_base 39: mod_base = OTHER; note = Cytosine phosphorothiorate
  modified_base 50: mod_base = OTHER; note = Guanosine phosphorothiorate
  modified_base 56: mod_base = OTHER; note = Adenosine phosphorothiorate
  modified_base 58: mod_base = OTHER; note = 2'-Omethylguanosine phosphorothiorate
  modified_base 73: mod_base = OTHER; note = Cytosine phosphorothiorate
  modified_base 74: mod_base = OTHER; note = 2'-Omethylcytosine

SEQ ID NO: 9377 - RNA, 76 nt, synthetic construct; identical to SEQ ID NO: 625
  source 1..76: mol_type = other RNA
  modified_base 10: mod_base = OTHER; note = 2'-Omethylguanosine
  modified_base 11: mod_base = OTHER; note = 2'-Omethylcytosine
  modified_base 12: mod_base = OTHER; note = 2'-Omethylguanosine
  modified_base 13: mod_base = OTHER; note = 2'-Omethylcytosine
  modified_base 22: mod_base = OTHER; note = 2'-Omethylguanosine
  modified_base 23: mod_base = OTHER; note = 2'-Omethylcytosine
  modified_base 24: mod_base = OTHER; note = 2'-Omethylguanosine
  modified_base 25: mod_base = OTHER; note = 2'-Omethylcytosine
  modified_base 44: mod_base = OTHER; note = 2'-Omethyladenosine
  modified_base 45: mod_base = OTHER; note = 2'-Omethylguanosine
  modified_base 46: mod_base = OTHER; note = 2'-Omethylguanosine
  modified_base 54: mod_base = OTHER; note = Uridine phosphorothiorate
  modified_base 55: mod_base = OTHER; note = Uridine phosphorothiorate
  modified_base 56: mod_base = OTHER; note = Cytosine phosphorothiorate
  modified_base 57: mod_base = OTHER; note = Guanosine phosphorothiorate

SEQ ID NO: 9378 - RNA, 76 nt, synthetic construct; identical to SEQ ID NO: 625
  source 1..76: mol_type = other RNA
  modified_base 1: mod_base = OTHER; note = Guanosine phosphorothiorate
  modified_base 2: mod_base = OTHER; note = 2'-fluoroguanosine
  modified_base 3: mod_base = OTHER; note = 2'-Omethylcytosine
  modified_base 4: mod_base = OTHER; note = 2'-Omethyluridine
  modified_base 6: mod_base = OTHER; note = 2'-fluorocytosine
  modified_base 10: mod_base = OTHER; note = 2'-Omethylguanosine phosphorothiorate
  modified_base 11: mod_base = OTHER; note = Cytosine phosphorothiorate
  modified_base 12: mod_base = OTHER; note = 2'-fluoroguanosine
  modified_base 23: mod_base = OTHER; note = Cytosine phosphorothiorate
  modified_base 24: mod_base = OTHER; note = 2'-Omethylguanosine
  modified_base 26: mod_base = OTHER; note = 2'-Omethyladenosine
  modified_base 29: mod_base = OTHER; note = 2'-Omethylguanosine
  modified_base 33: mod_base = OTHER; note = 2'-fluorouridine
  modified_base 37: mod_base = OTHER; note = Adenosine phosphorothiorate
  modified_base 38: mod_base = OTHER; note = 2'-Omethyladenosine
  modified_base 39: mod_base = OTHER; note = 2'-fluorouridine
  modified_base 40: mod_base = OTHER; note = Uridine phosphorothiorate
  modified_base 42: mod_base = OTHER; note = 2'-Omethyladenosine
  modified_base 43: mod_base = OTHER; note = 2'-fluoroadenosine
  modified_base 44: mod_base = OTHER; note = 2'-fluoroadenosine phosphorothiorate
  modified_base 45: mod_base = OTHER; note = 2'-Omethylguanosine
  modified_base 46: mod_base = OTHER; note = 2'-Omethylguanosine phosphorothiorate
  modified_base 47: mod_base = OTHER; note = 2'-Omethyluridine
  modified_base 51: mod_base = OTHER; note = Guanosine phosphorothiorate
  modified_base 52: mod_base = OTHER; note = Guanosine phosphorothiorate
  modified_base 53: mod_base = OTHER; note = 2'-fluoroguanosine
  modified_base 54: mod_base = OTHER; note = 2'-Omethyluridine
  modified_base 56: mod_base = OTHER; note = 2'-Omethylcytosine phosphorothiorate
  modified_base 59: mod_base = OTHER; note = 2'-fluoroguanosine
  modified_base 60: mod_base = OTHER; note = 2'-Omethyluridine phosphorothiorate
  modified_base 61: mod_base = OTHER; note = 2'-Omethylcytosine
  modified_base 64: mod_base = OTHER; note = 2'-fluoroguanosine
  modified_base 70: mod_base = OTHER; note = 2'-fluoroguanosine
  modified_base 71: mod_base = OTHER; note = Uridine phosphorothiorate
  modified_base 72: mod_base = OTHER; note = 2'-fluorocytosine
  modified_base 73: mod_base = OTHER; note = 2'-fluoroguanosine
  modified_base 75: mod_base = OTHER; note = Cytosine phosphorothiorate
  modified_base 76: mod_base = OTHER; note = 2'-fluoroadenosine

SEQ ID NO: 9379 - RNA, 76 nt, synthetic construct; identical to SEQ ID NO: 3289
  source 1..76: mol_type = other RNA
  modified_base 1: mod_base = OTHER; note = 2'-Omethylguanosine
  modified_base 2: mod_base = OTHER; note = 2'-Omethylcytosine
  modified_base 3: mod_base = OTHER; note = 2'-Omethylcytosine
  modified_base 4: mod_base = OTHER; note = 2'-Omethyluridine
  modified_base 5: mod_base = OTHER; note = 2'-Omethylguanosine
  modified_base 6: mod_base = OTHER; note = 2'-Omethylguanosine
  modified_base 22: mod_base = OTHER; note = 2'-Omethylguanosine
  modified_base 23: mod_base = OTHER; note = 2'-Omethyladenosine
  modified_base 24: mod_base = OTHER; note = 2'-Omethylguanosine
  modified_base 25: mod_base = OTHER; note = 2'-Omethylcytosine
  modified_base 49: mod_base = OTHER; note = 2'-Omethylcytosine
  modified_base 50: mod_base = OTHER; note = 2'-Omethyladenosine
  modified_base 51: mod_base = OTHER; note = 2'-Omethylguanosine
  modified_base 52: mod_base = OTHER; note = 2'-Omethylguanosine
  modified_base 53: mod_base = OTHER; note = 2'-Omethylguanosine

SEQ ID NO: 9380 - RNA, 86 nt, synthetic construct; identical to SEQ ID NO: 3290
  source 1..86: mol_type = other RNA
  modified_base 46: mod_base = OTHER; note = 2'-Omethylguanosine

SEQ ID NO: 9381 - RNA, 75 nt, synthetic construct; identical to SEQ ID NO: 3299
  source 1..75: mol_type = other RNA
  modified_base 13: mod_base = OTHER; note = 2'-Omethyladenosine
  modified_base 14: mod_base = OTHER; note = Guanosine phosphorothiorate
  modified_base 16: mod_base = OTHER; note = 2'-Omethylcytosine phosphorothiorate
  modified_base 21: mod_base = OTHER; note = 2'-fluoroguanosine
  modified_base 27: mod_base = OTHER; note = Cytosine phosphorothiorate
  modified_base 28: mod_base = OTHER; note = 2'-fluoroadenosine
  modified_base 38: mod_base = OTHER; note = 2'-fluorouridine phosphorothiorate
  modified_base 46: mod_base = OTHER; note = 2'-fluorouridine
  modified_base 47: mod_base = OTHER; note = 2'-fluorocytosine
  modified_base 53: mod_base = OTHER; note = 2'-fluorouridine
  modified_base 73: mod_base = OTHER; note = Cytosine phosphorothiorate
  modified_base 74: mod_base = OTHER; note = 2'-Omethylcytosine

SEQ ID NO: 9382 - RNA, 76 nt, synthetic construct; identical to SEQ ID NO: 3295
  source 1..76: mol_type = other RNA
  modified_base 1: mod_base = OTHER; note = 2'-Omethylcytosine
  modified_base 2: mod_base = OTHER; note = 2'-Omethylcytosine phosphorothiorate
  modified_base 3: mod_base = OTHER; note = 2'-fluorouridine phosphorothiorate
  modified_base 6: mod_base = OTHER; note = Guanosine phosphorothiorate
  modified_base 9: mod_base = OTHER; note = 2'-Omethyladenosine phosphorothiorate
  modified_base 11: mod_base = OTHER; note = Cytosine phosphorothiorate
  modified_base 16: mod_base = OTHER; note = 2'-fluorouridine phosphorothiorate
  modified_base 20: mod_base = OTHER; note = 2'-Omethyluridine
  modified_base 24: mod_base = OTHER; note = 2'-Omethylguanosine phosphorothiorate
  modified_base 31: mod_base = OTHER; note = 2'-Omethyladenosine
  modified_base 48: mod_base = OTHER; note = 2'-Omethylcytosine
  modified_base 52: mod_base = OTHER; note = 2'-fluoroguanosine phosphorothiorate
  modified_base 53: mod_base = OTHER; note = 2'-fluoroguanosine phosphorothiorate
  modified_base 55: mod_base = OTHER; note = 2'-fluorouridine phosphorothiorate
  modified_base 60: mod_base = OTHER; note = 2'-fluorouridine
  modified_base 68: mod_base = OTHER; note = 2'-fluoroguanosine
  modified_base 74: mod_base = OTHER; note = 2'-Omethylcytosine phosphorothiorate
  modified_base 75: mod_base = OTHER; note = Cytosine phosphorothiorate
  modified_base 76: mod_base = OTHER; note = 2'-Omethyladenosine

SEQ ID NO: 9383 - RNA, 76 nt, synthetic construct; identical to SEQ ID NO: 625
  source 1..76: mol_type = other RNA
  modified_base 40: mod_base = OTHER; note = Thymine

SEQ ID NO: 9384 - RNA, 85 nt, synthetic construct; identical to SEQ ID NO: 3297
  source 1..85: mol_type = other RNA
  modified_base 1: mod_base = OTHER; note = 2'-Omethylguanosine phosphorothiorate
  modified_base 2: mod_base = OTHER; note = 2'-Omethylcytosine phosphorothiorate
  modified_base 3: mod_base = OTHER; note = 2'-Omethyluridine
  modified_base 4: mod_base = OTHER; note = 2'-Omethylguanosine
  modified_base 5: mod_base = OTHER; note = 2'-Omethyluridine
  modified_base 6: mod_base = OTHER; note = 2'-Omethylguanosine
  modified_base 16: mod_base = OTHER; note = 2'-Omethyluridine
  modified_base 17: mod_base = OTHER; note = 2'-Omethylguanosine
  modified_base 18: mod_base = OTHER; note = 2'-Omethylguanosine
  modified_base 20: mod_base = OTHER; note = 2'-Omethyluridine
  modified_base 22: mod_base = OTHER; note = 2'-Omethyladenosine
  modified_base 24: mod_base = OTHER; note = 2'-Omethylguanosine
  modified_base 25: mod_base = OTHER; note = 2'-Omethylcytosine
  modified_base 27: mod_base = OTHER; note = 2'-Omethyluridine
  modified_base 33: mod_base = OTHER; note = 2'-fluorouridine
  modified_base 35: mod_base = OTHER; note = Cytosine phosphorothiorate
  modified_base 37: mod_base = OTHER; note = Adenosine phosphorothiorate
  modified_base 38: mod_base = OTHER; note = Adenosine phosphorothiorate
  modified_base 44: mod_base = OTHER; note = 2'-Omethyluridine
  modified_base 56: mod_base = OTHER; note = 2'-fluoroguanosine
  modified_base 57: mod_base = OTHER; note = 2'-fluorocytosine
  modified_base 58: mod_base = OTHER; note = 2'-Omethylguanosine
  modified_base 59: mod_base = OTHER; note = 2'-Omethylcytosine
  modified_base 60: mod_base = OTHER; note = 2'-Omethyladenosine
  modified_base 61: mod_base = OTHER; note = 2'-Omethylguanosine
  modified_base 62: mod_base = OTHER; note = 2'-Omethylguanosine
  modified_base 63: mod_base = OTHER; note = 2'-Omethyluridine
  modified_base 65: mod_base = OTHER; note = 2'-Omethylcytosine
  modified_base 68: mod_base = OTHER; note = 2'-Omethyladenosine
  modified_base 70: mod_base = OTHER; note = 2'-Omethylcytosine
  modified_base 71: mod_base = OTHER; note = 2'-Omethylcytosine
  modified_base 72: mod_base = OTHER; note = 2'-fluorouridine
  modified_base 73: mod_base = OTHER; note = 2'-Omethylguanosine
  modified_base 74: mod_base = OTHER; note = 2'-Omethylcytosine
  modified_base 75: mod_base = OTHER; note = 2'-Omethyluridine
  modified_base 76: mod_base = OTHER; note = 2'-Omethylcytosine
  modified_base 77: mod_base = OTHER; note = 2'-Omethyladenosine
  modified_base 82: mod_base = OTHER; note = 2'-Omethylguanosine

SEQ ID NO: 9385 - RNA, 75 nt, synthetic construct; identical to SEQ ID NO: 3336
  source 1..75: mol_type = other RNA
  modified_base 2: mod_base = OTHER; note = 2'-Omethylcytosine
  modified_base 13: mod_base = OTHER; note = 2'-Omethyladenosine phosphorothiorate
  modified_base 20: mod_base = OTHER; note = 2'-fluoroadenosine
  modified_base 26: mod_base = OTHER; note = Uridine phosphorothiorate
  modified_base 27: mod_base = OTHER; note = Cytosine phosphorothiorate
  modified_base 33: mod_base = OTHER; note = 2'-Omethylcytosine phosphorothiorate
  modified_base 45: mod_base = OTHER; note = 2'-fluoroguanosine
  modified_base 46: mod_base = OTHER; note = 2'-fluorouridine
  modified_base 50: mod_base = OTHER; note = Guanosine phosphorothiorate
  modified_base 53: mod_base = OTHER; note = 2'-fluorouridine
  modified_base 73: mod_base = OTHER; note = Cytosine phosphorothiorate
  modified_base 74: mod_base = OTHER; note = Cytosine phosphorothiorate

SEQ ID NO: 9386 - RNA, 76 nt, synthetic construct
  source 1..76: mol_type = other RNA
ggcctcgtggcctaatggataaggcgtctgacttcagatcagaagattgcaggttcgagtcctgccggggtcgcca

SEQ ID NO: 9387 - RNA, 76 nt, synthetic construct; identical to SEQ ID NO: 3318
  source 1..76: mol_type = other RNA
  modified_base 1: mod_base = OTHER; note = 2'-Omethylcytosine
  modified_base 9: mod_base = OTHER; note = 2'-fluoroadenosine
  modified_base 10: mod_base = OTHER; note = 2'-Omethylguanosine
  modified_base 13: mod_base = OTHER; note = 2'-Omethylcytosine
  modified_base 18: mod_base = OTHER; note = Guanosine phosphorothiorate
  modified_base 19: mod_base = OTHER; note = 2'-Omethylguanosine
  modified_base 20: mod_base = OTHER; note = Uridine phosphorothiorate
  modified_base 25: mod_base = OTHER; note = 2'-Omethylcytosine
  modified_base 29: mod_base = OTHER; note = 2'-Omethylguanosine
  modified_base 33: mod_base = OTHER; note = 2'-fluorouridine
  modified_base 35: mod_base = OTHER; note = Uridine phosphorothiorate
  modified_base 37: mod_base = OTHER; note = Guanosine phosphorothiorate
  modified_base 38: mod_base = OTHER; note = Adenosine phosphorothiorate
  modified_base 41: mod_base = OTHER; note = 2'-fluorocytosine
  modified_base 43: mod_base = OTHER; note = 2'-Omethyluridine
  modified_base 44: mod_base = OTHER; note = 2'-fluoroadenosine
  modified_base 46: mod_base = OTHER; note = Guanosine phosphorothiorate
  modified_base 50: mod_base = OTHER; note = 2'-Omethylcytosine
  modified_base 52: mod_base = OTHER; note = 2'-Omethylguanosine
  modified_base 54: mod_base = OTHER; note = Uridine phosphorothiorate
  modified_base 55: mod_base = OTHER; note = Uridine phosphorothiorate
  modified_base 56: mod_base = OTHER; note = 2'-Omethylcytosine
  modified_base 57: mod_base = OTHER; note = Guanosine phosphorothiorate
  modified_base 62: mod_base = OTHER; note = 2'-Omethylcytosine
  modified_base 63: mod_base = OTHER; note = 2'-fluoroguanosine
  modified_base 65: mod_base = OTHER; note = 2'-Omethylcytosine
  modified_base 71: mod_base = OTHER; note = 2'-Omethylguanosine
  modified_base 73: mod_base = OTHER; note = 2'-Omethyladenosine

SEQ ID NO: 9388 - RNA, 76 nt, synthetic construct; identical to SEQ ID NO: 3289
  source 1..76: mol_type = other RNA
  modified_base 1: mod_base = OTHER; note = 2'-Omethylguanosine
  modified_base 10: mod_base = OTHER; note = 2'-Omethylguanosine
  modified_base 11: mod_base = OTHER; note = 2'-Omethylcytosine
  modified_base 12: mod_base = OTHER; note = 2'-Omethyluridine
  modified_base 13: mod_base = OTHER; note = 2'-Omethylcytosine
  modified_base 14: mod_base = OTHER; note = 2'-Omethyladenosine
  modified_base 15: mod_base = OTHER; note = 2'-Omethylguanosine
  modified_base 16: mod_base = OTHER; note = 2'-Omethyluridine
  modified_base 18: mod_base = OTHER; note = 2'-Omethylguanosine
  modified_base 19: mod_base = OTHER; note = 2'-Omethylguanosine
  modified_base 20: mod_base = OTHER; note = Uridine phosphorothiorate
  modified_base 21: mod_base = OTHER; note = Adenosine phosphorothiorate
  modified_base 22: mod_base = OTHER; note = 2'-Omethylguanosine
  modified_base 23: mod_base = OTHER; note = 2'-Omethyladenosine
  modified_base 24: mod_base = OTHER; note = 2'-Omethylguanosine
  modified_base 25: mod_base = OTHER; note = 2'-Omethylcytosine
  modified_base 33: mod_base = OTHER; note = 2'-fluorouridine
  modified_base 34: mod_base = OTHER; note = 2'-Omethyluridine
  modified_base 35: mod_base = OTHER; note = Uridine phosphorothiorate
  modified_base 37: mod_base = OTHER; note = Adenosine phosphorothiorate
  modified_base 38: mod_base = OTHER; note = Adenosine phosphorothiorate
  modified_base 49: mod_base = OTHER; note = 2'-Omethylcytosine
  modified_base 50: mod_base = OTHER; note = 2'-Omethyladenosine
  modified_base 52: mod_base = OTHER; note = 2'-Omethylguanosine
  modified_base 54: mod_base = OTHER; note = Uridine phosphorothiorate
  modified_base 55: mod_base = OTHER; note = Uridine phosphorothiorate
  modified_base 61: mod_base = OTHER; note = 2'-Omethylcytosine
  modified_base 65: mod_base = OTHER; note = 2'-Omethylguanosine
  modified_base 73: mod_base = OTHER; note = 2'-Omethylguanosine

SEQ ID NO: 9389 - RNA, 85 nt, synthetic construct; identical to SEQ ID NO: 3297
  source 1..85: mol_type = other RNA
  modified_base 1: mod_base = OTHER; note = 2'-Omethylguanosine phosphorothiorate
  modified_base 2: mod_base = OTHER; note = 2'-Omethylcytosine phosphorothiorate
  modified_base 3: mod_base = OTHER; note = 2'-Omethyluridine
  modified_base 4: mod_base = OTHER; note = 2'-Omethylguanosine
  modified_base 5: mod_base = OTHER; note = 2'-Omethyluridine
  modified_base 6: mod_base = OTHER; note = 2'-Omethylguanosine
  modified_base 16: mod_base = OTHER; note = 2'-Omethyluridine
  modified_base 17: mod_base = OTHER; note = 2'-Omethylguanosine
  modified_base 18: mod_base = OTHER; note = 2'-Omethylguanosine
  modified_base 20: mod_base = OTHER; note = 2'-Omethyluridine
  modified_base 25: mod_base = OTHER; note = 2'-Omethylcytosine
  modified_base 33: mod_base = OTHER; note = 2'-fluorouridine
  modified_base 35: mod_base = OTHER; note = Cytosine phosphorothiorate
  modified_base 37: mod_base = OTHER; note = Adenosine phosphorothiorate
  modified_base 38: mod_base = OTHER; note = Adenosine phosphorothiorate
  modified_base 41: mod_base = OTHER; note = 2'-Omethylcytosine
  modified_base 44: mod_base = OTHER; note = 2'-Omethyluridine
  modified_base 56: mod_base = OTHER; note = 2'-fluoroguanosine
  modified_base 57: mod_base = OTHER; note = 2'-fluorocytosine
  modified_base 65: mod_base = OTHER; note = 2'-Omethylcytosine
  modified_base 68: mod_base = OTHER; note = 2'-Omethyladenosine
  modified_base 70: mod_base = OTHER; note = 2'-Omethylcytosine
  modified_base 71: mod_base = OTHER; note = 2'-Omethylcytosine
  modified_base 72: mod_base = OTHER; note = 2'-fluorouridine
  modified_base 73: mod_base = OTHER; note = 2'-Omethylguanosine
  modified_base 74: mod_base = OTHER; note = 2'-Omethylcytosine
  modified_base 75: mod_base = OTHER; note = 2'-Omethyluridine
  modified_base 76: mod_base = OTHER; note = 2'-Omethylcytosine
  modified_base 77: mod_base = OTHER; note = 2'-Omethyladenosine
  modified_base 82: mod_base = OTHER; note = 2'-Omethylguanosine

SEQ ID NO: 9390 - RNA, 76 nt, synthetic construct; identical to SEQ ID NO: 625
  source 1..76: mol_type = other RNA
  modified_base 1: mod_base = OTHER; note = 2'-Omethylguanosine phosphorothiorate
  modified_base 2: mod_base = OTHER; note = 2'-Omethylguanosine
  modified_base 13: mod_base = OTHER; note = 2'-Omethylcytosine
  modified_base 17: mod_base = OTHER; note = 2'-Omethylguanosine
  modified_base 33: mod_base = OTHER; note = 2'-fluorouridine
  modified_base 35: mod_base = OTHER; note = Cytosine phosphorothiorate
  modified_base 37: mod_base = OTHER; note = Adenosine phosphorothiorate
  modified_base 38: mod_base = OTHER; note = Adenosine phosphorothiorate
  modified_base 52: mod_base = OTHER; note = 2'-Omethylguanosine
  modified_base 62: mod_base = OTHER; note = 2'-Omethylcytosine
  modified_base 63: mod_base = OTHER; note = 2'-fluorocytosine
  modified_base 73: mod_base = OTHER; note = 2'-Omethylguanosine
  modified_base 75: mod_base = OTHER; note = 2'-fluorocytosine phosphorothiorate
  modified_base 76: mod_base = OTHER; note = 2'-Omethyladenosine

SEQ ID NO: 9391 - RNA, 76 nt, synthetic construct; identical to SEQ ID NO: 625
  source 1..76: mol_type = other RNA
  modified_base 1: mod_base = OTHER; note = 2'-Omethylguanosine
  modified_base 10: mod_base = OTHER; note = 2'-Omethylguanosine
  modified_base 13: mod_base = OTHER; note = 2'-Omethylcytosine
  modified_base 17: mod_base = OTHER; note = Guanosine phosphorothiorate
  modified_base 18: mod_base = OTHER; note = 2'-Omethylguanosine
  modified_base 19: mod_base = OTHER; note = Adenosine phosphorothiorate
  modified_base 20: mod_base = OTHER; note = 2'-Omethyluridine
  modified_base 25: mod_base = OTHER; note = 2'-Omethylcytosine
  modified_base 29: mod_base = OTHER; note = 2'-Omethylguanosine
  modified_base 33: mod_base = OTHER; note = 2'-fluorouridine
  modified_base 35: mod_base = OTHER; note = Cytosine phosphorothiorate
  modified_base 37: mod_base = OTHER; note = Adenosine phosphorothiorate
  modified_base 38: mod_base = OTHER; note = Adenosine phosphorothiorate
  modified_base 41: mod_base = OTHER; note = 2'-fluorocytosine phosphorothiorate
  modified_base 43: mod_base = OTHER; note = 2'-Omethyladenosine
  modified_base 44: mod_base = OTHER; note = 2'-fluoroadenosine
  modified_base 50: mod_base = OTHER; note = 2'-Omethylcytosine
  modified_base 52: mod_base = OTHER; note = 2'-Omethylguanosine
  modified_base 54: mod_base = OTHER; note = Uridine phosphorothiorate
  modified_base 55: mod_base = OTHER; note = Uridine phosphorothiorate
  modified_base 56: mod_base = OTHER; note = 2'-Omethylcytosine
  modified_base 57: mod_base = OTHER; note = Guanosine phosphorothiorate
  modified_base 62: mod_base = OTHER; note = 2'-Omethylcytosine
  modified_base 63: mod_base = OTHER; note = 2'-fluorocytosine
  modified_base 65: mod_base = OTHER; note = 2'-Omethylguanosine
  modified_base 71: mod_base = OTHER; note = 2'-Omethyluridine
  modified_base 73: mod_base = OTHER; note = 2'-Omethylguanosine

SEQ ID NO: 9392 - RNA, 82 nt, synthetic construct; identical to SEQ ID NO: 4354
  source 1..82: mol_type = other RNA
  modified_base 1: mod_base = OTHER; note = 2'-Omethylguanosine
  modified_base 2: mod_base = OTHER; note = 2'-Omethylcytosine
  modified_base 3: mod_base = OTHER; note = 2'-Omethyluridine
  modified_base 4: mod_base = OTHER; note = 2'-Omethylguanosine
  modified_base 5: mod_base = OTHER; note = 2'-Omethyluridine
  modified_base 6: mod_base = OTHER; note = 2'-Omethylguanosine

SEQ ID NO: 9393 - RNA, 85 nt, synthetic construct; identical to SEQ ID NO: 3288
  source 1..85: mol_type = other RNA
  modified_base 1: mod_base = OTHER; note = 2'-Omethylcytosine
  modified_base 11: mod_base = OTHER; note = Cytosine phosphorothiorate
  modified_base 28: mod_base = OTHER; note = 2'-fluoroguanosine
  modified_base 32: mod_base = OTHER; note = 2'-fluorouridine
  modified_base 42: mod_base = OTHER; note = Adenosine phosphorothiorate
  modified_base 54: mod_base = OTHER; note = 2'-Omethylcytosine
  modified_base 57: mod_base = OTHER; note = 2'-Omethylcytosine
  modified_base 59: mod_base = OTHER; note = 2'-Omethyluridine
  modified_base 83: mod_base = OTHER; note = Cytosine phosphorothiorate
  modified_base 84: mod_base = OTHER; note = 2'-Omethylcytosine
  modified_base 85: mod_base = OTHER; note = 2'-fluoroadenosine

SEQ ID NO: 9394 - RNA, 76 nt, synthetic construct; identical to SEQ ID NO: 625
  source 1..76: mol_type = other RNA
  modified_base 1: mod_base = OTHER; note = 2'-Omethylguanosine
  modified_base 10: mod_base = OTHER; note = 2'-Omethylguanosine
  modified_base 13: mod_base = OTHER; note = 2'-Omethylcytosine
  modified_base 17: mod_base = OTHER; note = Guanosine phosphorothiorate
  modified_base 18: mod_base = OTHER; note = 2'-Omethylguanosine
  modified_base 19: mod_base = OTHER; note = Adenosine phosphorothiorate
  modified_base 20: mod_base = OTHER; note = 2'-Omethyluridine
  modified_base 25: mod_base = OTHER; note = 2'-Omethylcytosine
  modified_base 29: mod_base = OTHER; note = 2'-Omethylguanosine
  modified_base 33: mod_base = OTHER; note = 2'-fluorouridine
  modified_base 35: mod_base = OTHER; note = Cytosine phosphorothiorate
  modified_base 37: mod_base = OTHER; note = Adenosine phosphorothiorate
  modified_base 38: mod_base = OTHER; note = Adenosine phosphorothiorate
  modified_base 41: mod_base = OTHER; note = 2'-fluorocytosine phosphorothiorate
  modified_base 43: mod_base = OTHER; note = 2'-Omethyladenosine
  modified_base 44: mod_base = OTHER; note = 2'-fluoroadenosine
  modified_base 50: mod_base = OTHER; note = 2'-Omethylcytosine
  modified_base 52: mod_base = OTHER; note = 2'-Omethylguanosine
  modified_base 54: mod_base = OTHER; note = Uridine phosphorothiorate
  modified_base 55: mod_base = OTHER; note = Uridine phosphorothiorate
  modified_base 56: mod_base = OTHER; note = 2'-Omethylcytosine
  modified_base 57: mod_base = OTHER; note = Guanosine phosphorothiorate
  modified_base 62: mod_base = OTHER; note = 2'-Omethylcytosine
  modified_base 63: mod_base = OTHER; note = 2'-fluorocytosine
  modified_base 65: mod_base = OTHER; note = 2'-Omethylguanosine phosphorothiorate
  modified_base 71: mod_base = OTHER; note = 2'-Omethyluridine
  modified_base 73: mod_base = OTHER; note = 2'-Omethylguanosine

SEQ ID NO: 9395 - RNA, 76 nt, synthetic construct; identical to SEQ ID NO: 3289
  source 1..76: mol_type = other RNA
  modified_base 1: mod_base = OTHER; note = 2'-Omethylguanosine phosphorothiorate
  modified_base 2: mod_base = OTHER; note = 2'-Omethylcytosine phosphorothiorate
  modified_base 9: mod_base = OTHER; note = Adenosine phosphorothiorate
  modified_base 10: mod_base = OTHER; note = 2'-fluoroguanosine
  modified_base 29: mod_base = OTHER; note = Adenosine phosphorothiorate
  modified_base 30: mod_base = OTHER; note = 2'-Omethylguanosine
  modified_base 64: mod_base = OTHER; note = Uridine phosphorothiorate
  modified_base 74: mod_base = OTHER; note = Cytosine phosphorothiorate
  modified_base 75: mod_base = OTHER; note = 2'-Omethylcytosine

SEQ ID NO: 9396 - RNA, 76 nt, synthetic construct; identical to SEQ ID NO: 625
  source 1..76: mol_type = other RNA
  modified_base 1: mod_base = OTHER; note = 2'-Omethylguanosine
  modified_base 10: mod_base = OTHER; note = 2'-Omethylguanosine
  modified_base 13: mod_base = OTHER; note = 2'-Omethylcytosine
  modified_base 17: mod_base = OTHER; note = Guanosine phosphorothiorate
  modified_base 18: mod_base = OTHER; note = 2'-Omethylguanosine
  modified_base 19: mod_base = OTHER; note = Adenosine phosphorothiorate
  modified_base 20: mod_base = OTHER; note = 2'-Omethyluridine
  modified_base 25: mod_base = OTHER; note = 2'-Omethylcytosine
  modified_base 29: mod_base = OTHER; note = 2'-Omethylguanosine
  modified_base 33: mod_base = OTHER; note = 2'-fluorouridine
  modified_base 35: mod_base = OTHER; note = Cytosine phosphorothiorate
  modified_base 37: mod_base = OTHER; note = Adenosine phosphorothiorate
  modified_base 38: mod_base = OTHER; note = Adenosine phosphorothiorate
  modified_base 43: mod_base = OTHER; note = 2'-Omethyladenosine
  modified_base 44: mod_base = OTHER; note = 2'-fluoroadenosine
  modified_base 46: mod_base = OTHER; note = Guanosine phosphorothiorate
  modified_base 50: mod_base = OTHER; note = 2'-Omethylcytosine
  modified_base 52: mod_base = OTHER; note = 2'-Omethylguanosine
  modified_base 54: mod_base = OTHER; note = Uridine phosphorothiorate
  modified_base 55: mod_base = OTHER; note = Uridine phosphorothiorate
  modified_base 57: mod_base = OTHER; note = Guanosine phosphorothiorate
  modified_base 62: mod_base = OTHER; note = 2'-Omethylcytosine
  modified_base 63: mod_base = OTHER; note = 2'-fluorocytosine
  modified_base 65: mod_base = OTHER; note = 2'-Omethylguanosine
  modified_base 71: mod_base = OTHER; note = 2'-Omethyluridine
  modified_base 73: mod_base = OTHER; note = 2'-Omethylguanosine

SEQ ID NO: 9397 - RNA, 74 nt, synthetic construct; identical to SEQ ID NO: 766
  source 1..74: mol_type = other RNA
  modified_base 1: mod_base = OTHER; note = 2'-Omethylguanosine phosphorothiorate
  modified_base 2: mod_base = OTHER; note = 2'-Omethylguanosine
  modified_base 16: mod_base = OTHER; note = 2'-fluorouridine
  modified_base 73: mod_base = OTHER; note = 2'-Omethylguanosine

SEQ ID NO: 9398 - RNA, 85 nt, synthetic construct; identical to SEQ ID NO: 3288
  source 1..85: mol_type = other RNA
  modified_base 1: mod_base = OTHER; note = 2'-Omethylcytosine
  modified_base 13: mod_base = OTHER; note = Adenosine phosphorothiorate
  modified_base 30: mod_base = OTHER; note = 2'-fluoroadenosine
  modified_base 36: mod_base = OTHER; note = Guanosine phosphorothiorate
  modified_base 44: mod_base = OTHER; note = 2'-Omethylguanosine
  modified_base 52: mod_base = OTHER; note = Guanosine phosphorothiorate
  modified_base 58: mod_base = OTHER; note = 2'-Omethylguanosine
  modified_base 73: mod_base = OTHER; note = Adenosine phosphorothiorate
  modified_base 84: mod_base = OTHER; note = Cytosine phosphorothiorate

SEQ ID NO: 9399 - RNA, 86 nt, synthetic construct; identical to SEQ ID NO: 3290
  source 1..86: mol_type = other RNA
  modified_base 62: mod_base = OTHER; note = 2'-fluoroguanosine

SEQ ID NO: 9400 - RNA, 85 nt, synthetic construct; identical to SEQ ID NO: 3297
  source 1..85: mol_type = other RNA
  modified_base 1: mod_base = OTHER; note = 2'-Omethylguanosine
  modified_base 70: mod_base = OTHER; note = 2'-Omethylcytosine
  modified_base 71: mod_base = OTHER; note = 2'-Omethylcytosine
  modified_base 73: mod_base = OTHER; note = 2'-Omethylguanosine
  modified_base 74: mod_base = OTHER; note = 2'-Omethylcytosine
  modified_base 75: mod_base = OTHER; note = 2'-Omethyluridine
  modified_base 76: mod_base = OTHER; note = 2'-Omethylcytosine
  modified_base 77: mod_base = OTHER; note = 2'-Omethyladenosine
  modified_base 78: mod_base = OTHER; note = 2'-Omethylcytosine
  modified_base 79: mod_base = OTHER; note = 2'-fluoroadenosine
  modified_base 80: mod_base = OTHER; note = 2'-Omethylguanosine
  modified_base 81: mod_base = OTHER; note = 2'-Omethylcytosine
  modified_base 82: mod_base = OTHER; note = 2'-Omethylguanosine

SEQ ID NO: 9401 - RNA, 76 nt, synthetic construct; identical to SEQ ID NO: 625
  source 1..76: mol_type = other RNA
  modified_base 1: mod_base = OTHER; note = 2'-Omethylguanosine phosphorothiorate
  modified_base 2: mod_base = OTHER; note = 2'-Omethylguanosine
  modified_base 13: mod_base = OTHER; note = 2'-Omethylcytosine
  modified_base 17: mod_base = OTHER; note = 2'-Omethylguanosine
  modified_base 33: mod_base = OTHER; note = 2'-fluorouridine
  modified_base 35: mod_base = OTHER; note = Cytosine phosphorothiorate
  modified_base 37: mod_base = OTHER; note = Adenosine phosphorothiorate
  modified_base 38: mod_base = OTHER; note = Adenosine phosphorothiorate
  modified_base 52: mod_base = OTHER; note = 2'-fluoroguanosine
  modified_base 56: mod_base = OTHER; note = 2'-Omethylcytosine
  modified_base 62: mod_base = OTHER; note = 2'-Omethylcytosine
  modified_base 73: mod_base = OTHER; note = 2'-Omethylguanosine
  modified_base 75: mod_base = OTHER; note = 2'-fluorocytosine phosphorothiorate

SEQ ID NO: 9402 - RNA, 76 nt, synthetic construct; identical to SEQ ID NO: 625
  source 1..76: mol_type = other RNA
  modified_base 63: mod_base = OTHER; note = 2'-O-(2-Methoxyethyl) 5-methylcytosine

SEQ ID NO: 9403 - RNA, 75 nt, synthetic construct; identical to SEQ ID NO: 3306
  source 1..75: mol_type = other RNA
  modified_base 1: mod_base = OTHER; note = 2'-Omethylguanosine
  modified_base 14: mod_base = OTHER; note = 2'-Omethyladenosine
  modified_base 15: mod_base = OTHER; note = 2'-Omethyladenosine
  modified_base 16: mod_base = OTHER; note = 2'-Omethylcytosine
  modified_base 17: mod_base = OTHER; note = 2'-Omethylguanosine
  modified_base 18: mod_base = OTHER; note = 2'-Omethylguanosine
  modified_base 19: mod_base = OTHER; note = Uridine phosphorothiorate
  modified_base 20: mod_base = OTHER; note = Adenosine phosphorothiorate
  modified_base 32: mod_base = OTHER; note = Uridine phosphorothiorate
  modified_base 33: mod_base = OTHER; note = 2'-Omethylcytosine
  modified_base 34: mod_base = OTHER; note = Uridine phosphorothiorate
  modified_base 36: mod_base = OTHER; note = Guanosine phosphorothiorate
  modified_base 37: mod_base = OTHER; note = Adenosine phosphorothiorate
  modified_base 40: mod_base = OTHER; note = 2'-Omethyladenosine
  modified_base 41: mod_base = OTHER; note = 2'-Omethylguanosine
  modified_base 42: mod_base = OTHER; note = 2'-Omethyladenosine
  modified_base 43: mod_base = OTHER; note = 2'-Omethyladenosine
  modified_base 49: mod_base = OTHER; note = 2'-Omethylcytosine
  modified_base 51: mod_base = OTHER; note = 2'-Omethyluridine
  modified_base 72: mod_base = OTHER; note = 2'-Omethyladenosine

SEQ ID NO: 9404 - RNA, 76 nt, synthetic construct; identical to SEQ ID NO: 3318
  source 1..76: mol_type = other RNA
  modified_base 1: mod_base = OTHER; note = 2'-Omethylcytosine phosphorothiorate
  modified_base 2: mod_base = OTHER; note = 2'-Omethylcytosine phosphorothiorate
  modified_base 3: mod_base = OTHER; note = 2'-Omethyluridine
  modified_base 4: mod_base = OTHER; note = 2'-Omethyluridine
  modified_base 5: mod_base = OTHER; note = 2'-Omethylcytosine
  modified_base 6: mod_base = OTHER; note = 2'-Omethylguanosine
  modified_base 10: mod_base = OTHER; note = 2'-Omethylguanosine
  modified_base 11: mod_base = OTHER; note = 2'-Omethylcytosine
  modified_base 12: mod_base = OTHER; note = 2'-Omethyluridine
  modified_base 13: mod_base = OTHER; note = 2'-Omethylcytosine
  modified_base 14: mod_base = OTHER; note = 2'-Omethyladenosine
  modified_base 15: mod_base = OTHER; note = 2'-fluoroguanosine
  modified_base 16: mod_base = OTHER; note = 2'-Omethyluridine
  modified_base 18: mod_base = OTHER; note = 2'-Omethylguanosine
  modified_base 19: mod_base = OTHER; note = 2'-Omethylguanosine
  modified_base 20: mod_base = OTHER; note = 2'-fluorouridine
  modified_base 22: mod_base = OTHER; note = 2'-Omethylguanosine
  modified_base 23: mod_base = OTHER; note = 2'-Omethyladenosine
  modified_base 24: mod_base = OTHER; note = 2'-Omethylguanosine
  modified_base 25: mod_base = OTHER; note = 2'-Omethylcytosine
  modified_base 49: mod_base = OTHER; note = 2'-Omethylguanosine
  modified_base 50: mod_base = OTHER; note = 2'-Omethylcytosine
  modified_base 51: mod_base = OTHER; note = 2'-Omethyluridine
  modified_base 52: mod_base = OTHER; note = 2'-Omethylguanosine
  modified_base 53: mod_base = OTHER; note = 2'-Omethylguanosine
  modified_base 54: mod_base = OTHER; note = 2'-Omethyluridine
  modified_base 61: mod_base = OTHER; note = 2'-Omethylcytosine
  modified_base 62: mod_base = OTHER; note = 2'-Omethylcytosine
  modified_base 63: mod_base = OTHER; note = 2'-fluoroguanosine
  modified_base 64: mod_base = OTHER; note = 2'-Omethylguanosine
  modified_base 65: mod_base = OTHER; note = 2'-Omethylcytosine
  modified_base 66: mod_base = OTHER; note = 2'-Omethyluridine
  modified_base 67: mod_base = OTHER; note = 2'-Omethylcytosine
  modified_base 68: mod_base = OTHER; note = 2'-Omethylguanosine
  modified_base 73: mod_base = OTHER; note = 2'-Omethyladenosine

SEQ ID NO: 9405 - RNA, 76 nt, synthetic construct; identical to SEQ ID NO: 625
  source 1..76: mol_type = other RNA
  modified_base 1: mod_base = OTHER; note = 2'-Omethylguanosine phosphorothiorate
  modified_base 2: mod_base = OTHER; note = 2'-Omethylguanosine
  modified_base 13: mod_base = OTHER; note = 2'-fluorocytosine
  modified_base 33: mod_base = OTHER; note = 2'-fluorouridine
  modified_base 35: mod_base = OTHER; note = Cytosine phosphorothiorate
  modified_base 37: mod_base = OTHER; note = Adenosine phosphorothiorate
  modified_base 38: mod_base = OTHER; note = Adenosine phosphorothiorate
  modified_base 52: mod_base = OTHER; note = 2'-fluoroguanosine
  modified_base 56: mod_base = OTHER; note = 2'-Omethylcytosine
  modified_base 62: mod_base = OTHER; note = 2'-Omethylcytosine
  modified_base 63: mod_base = OTHER; note = 2'-fluorocytosine
  modified_base 73: mod_base = OTHER; note = 2'-Omethylguanosine
  modified_base 75: mod_base = OTHER; note = 2'-fluorocytosine phosphorothiorate

SEQ ID NO: 9406 - RNA, 76 nt, synthetic construct
  source 1..76: mol_type = other RNA
ggctctgtggcgcaatggatagcgcattggacttcaaattcaaaggttccgggttcgaatcccggcggagtcgcca

SEQ ID NO: 9407 - RNA, 86 nt, synthetic construct; identical to SEQ ID NO: 3290
  source 1..86: mol_type = other RNA
  modified_base 48: mod_base = OTHER; note = 2'-fluorocytosine

SEQ ID NO: 9408 - RNA, 85 nt, synthetic construct; identical to SEQ ID NO: 3317
  source 1..85: mol_type = other RNA
  modified_base 1: mod_base = OTHER; note = 2'-Omethylguanosine
  modified_base 3: mod_base = OTHER; note = 2'-Omethyluridine
  modified_base 14: mod_base = OTHER; note = 2'-Omethyladenosine
  modified_base 26: mod_base = OTHER; note = Guanosine phosphorothiorate
  modified_base 50: mod_base = OTHER; note = 2'-Omethylcytosine phosphorothiorate

SEQ ID NO: 9409 - DNA, 73 bp, synthetic construct; identical to SEQ ID NO: 3380
  source 1..73: mol_type = other DNA
  modified_base 1: mod_base = OTHER; note = 2'-Omethylguanosine phosphorothiorate
  modified_base 2: mod_base = OTHER; note = 2'-Omethylguanosine phosphorothiorate
  modified_base 27: mod_base = OTHER; note = Uridine phosphorothiorate
  modified_base 51: mod_base = OTHER; note = Guanosine phosphorothiorate
  modified_base 59: mod_base = OTHER; note = 2'-fluoroguanosine
  misc_feature 1..51: note = RNA
  misc_feature 52: note = DNA
  misc_feature 53..73: note = RNA

SEQ ID NO: 9410 - RNA, 76 nt, synthetic construct; identical to SEQ ID NO: 625
  source 1..76: mol_type = other RNA
  modified_base 1: mod_base = OTHER; note = 2'-Omethylguanosine
  modified_base 2: mod_base = OTHER; note = 2'-Omethylguanosine
  modified_base 3: mod_base = OTHER; note = 2'-Omethylcytosine
  modified_base 4: mod_base = OTHER; note = 2'-Omethyluridine
  modified_base 5: mod_base = OTHER; note = 2'-Omethylcytosine
  modified_base 6: mod_base = OTHER; note = 2'-Omethylcytosine
  modified_base 10: mod_base = OTHER; note = 2'-Omethylguanosine
  modified_base 11: mod_base = OTHER; note = 2'-Omethylcytosine
  modified_base 12: mod_base = OTHER; note = 2'-Omethylguanosine
  modified_base 13: mod_base = OTHER; note = 2'-Omethylcytosine
  modified_base 14: mod_base = OTHER; note = 2'-Omethyladenosine
  modified_base 15: mod_base = OTHER; note = 2'-fluoroadenosine
  modified_base 16: mod_base = OTHER; note = 2'-Omethyluridine
  modified_base 17: mod_base = OTHER; note = 2'-Omethylguanosine
  modified_base 18: mod_base = OTHER; note = 2'-Omethylguanosine
  modified_base 19: mod_base = OTHER; note = 2'-fluoroadenosine
  modified_base 20: mod_base = OTHER; note = 2'-Omethyluridine
  modified_base 21: mod_base = OTHER; note = 2'-fluoroadenosine
  modified_base 22: mod_base = OTHER; note = 2'-Omethylguanosine
  modified_base 23: mod_base = OTHER; note = 2'-Omethylcytosine
  modified_base 24: mod_base = OTHER; note = 2'-Omethylguanosine
  modified_base 25: mod_base = OTHER; note = 2'-Omethylcytosine
  modified_base 40: mod_base = OTHER; note = 2'-fluorouridine
  modified_base 41: mod_base = OTHER; note = 2'-fluorocytosine
  modified_base 42: mod_base = OTHER; note = 2'-fluoroadenosine
  modified_base 43: mod_base = OTHER; note = 2'-fluoroadenosine
  modified_base 49: mod_base = OTHER; note = 2'-Omethylcytosine
  modified_base 50: mod_base = OTHER; note = 2'-Omethylcytosine
  modified_base 51: mod_base = OTHER; note = 2'-Omethylguanosine
  modified_base 52: mod_base = OTHER; note = 2'-Omethylguanosine
  modified_base 53: mod_base = OTHER; note = 2'-Omethylguanosine
  modified_base 54: mod_base = OTHER; note = Uridine phosphorothiorate
  modified_base 55: mod_base = OTHER; note = Uridine phosphorothiorate
  modified_base 56: mod_base = OTHER; note = Cytosine phosphorothiorate
  modified_base 57: mod_base = OTHER; note = Guanosine phosphorothiorate
  modified_base 61: mod_base = OTHER; note = 2'-Omethylcytosine
  modified_base 62: mod_base = OTHER; note = 2'-Omethylcytosine
  modified_base 63: mod_base = OTHER; note = 2'-Omethylcytosine
  modified_base 64: mod_base = OTHER; note = 2'-Omethylguanosine
  modified_base 65: mod_base = OTHER; note = 2'-Omethylguanosine
  modified_base 66: mod_base = OTHER; note = 2'-Omethylcytosine
  modified_base 67: mod_base = OTHER; note = 2'-Omethylguanosine
  modified_base 68: mod_base = OTHER; note = 2'-Omethylguanosine
  modified_base 69: mod_base = OTHER; note = 2'-Omethyladenosine
  modified_base 73: mod_base = OTHER; note = 2'-Omethylguanosine

SEQ ID NO: 9411 - DNA, 73 bp, synthetic construct; identical to SEQ ID NO: 3380
  source 1..73: mol_type = other DNA
  modified_base 1: mod_base = OTHER; note = 2'-Omethylguanosine phosphorothiorate
  modified_base 2: mod_base = OTHER; note = 2'-Omethylguanosine phosphorothiorate
  modified_base 27: mod_base = OTHER; note = Uridine phosphorothiorate
  modified_base 51: mod_base = OTHER; note = Guanosine phosphorothiorate
  modified_base 59: mod_base = OTHER; note = 2'-fluoroguanosine
  modified_base 72: mod_base = OTHER; note = 2'-Omethylcytosine
  misc_feature 1..51: note = RNA
  misc_feature 52: note = DNA
  misc_feature 53..73: note = RNA

SEQ ID NO: 9412 - RNA, 74 nt, synthetic construct; identical to SEQ ID NO: 3293
  source 1..74: mol_type = other RNA
  modified_base 2: mod_base = OTHER; note = 2'-Omethylcytosine
  modified_base 3: mod_base = OTHER; note = Cytosine phosphorothiorate
  modified_base 4: mod_base = OTHER; note = 2'-Omethyluridine phosphorothiorate
  modified_base 9: mod_base = OTHER; note = 2'-fluoroguanosine
  modified_base 11: mod_base = OTHER; note = 2'-fluoroguanosine
  modified_base 39: mod_base = OTHER; note = 2'-Omethyladenosine
  modified_base 42: mod_base = OTHER; note = 2'-fluoroadenosine
  modified_base 73: mod_base = OTHER; note = 2'-Omethylcytosine phosphorothiorate

SEQ ID NO: 9413 - RNA, 86 nt, synthetic construct; identical to SEQ ID NO: 3290
  source 1..86: mol_type = other RNA
  modified_base 1: mod_base = OTHER; note = 2'-Omethyladenosine phosphorothiorate
  modified_base 2: mod_base = OTHER; note = Cytosine phosphorothiorate
  modified_base 85: mod_base = OTHER; note = 2'-Omethylcytosine phosphorothiorate

SEQ ID NO: 9414 - RNA, 86 nt, synthetic construct; identical to SEQ ID NO: 3290
  source 1..86: mol_type = other RNA
  modified_base 44: mod_base = OTHER; note = 2'-fluorouridine

SEQ ID NO: 9415 - RNA, 74 nt, synthetic construct; identical to SEQ ID NO: 766
  source 1..74: mol_type = other RNA
  modified_base 1: mod_base = OTHER; note = 2'-Omethylguanosine phosphorothiorate
  modified_base 2: mod_base = OTHER; note = 2'-Omethylguanosine phosphorothiorate
  modified_base 45: mod_base = OTHER; note = 2'-fluoroguanosine
  modified_base 57: mod_base = OTHER; note = 2'-fluoroguanosine
  modified_base 68: mod_base = OTHER; note = 2'-fluoroguanosine
  modified_base 73: mod_base = OTHER; note = 2'-Omethylguanosine

SEQ ID NO: 9416 - RNA, 76 nt, synthetic construct; identical to SEQ ID NO: 625
  source 1..76: mol_type = other RNA
  modified_base 2: mod_base = OTHER; note = 2'-Omethylguanosine
  modified_base 3: mod_base = OTHER; note = 2'-fluorocytosine
  modified_base 5: mod_base = OTHER; note = 2'-fluorocytosine
  modified_base 7: mod_base = OTHER; note = Guanosine phosphorothiorate
  modified_base 12: mod_base = OTHER; note = 2'-Omethylguanosine
  modified_base 13: mod_base = OTHER; note = 2'-fluorocytosine phosphorothiorate
  modified_base 14: mod_base = OTHER; note = 2'-Omethyladenosine phosphorothiorate
  modified_base 15: mod_base = OTHER; note = 2'-fluoroadenosine phosphorothiorate
  modified_base 20: mod_base = OTHER; note = 2'-Omethyluridine
  modified_base 26: mod_base = OTHER; note = 2'-Omethyladenosine
  modified_base 33: mod_base = OTHER; note = Uridine phosphorothiorate
  modified_base 38: mod_base = OTHER; note = 2'-Omethyladenosine
  modified_base 41: mod_base = OTHER; note = 2'-fluorocytosine phosphorothiorate
  modified_base 42: mod_base = OTHER; note = 2'-fluoroadenosine
  modified_base 43: mod_base = OTHER; note = 2'-Omethyladenosine
  modified_base 44: mod_base = OTHER; note = 2'-fluoroadenosine
  modified_base 45: mod_base = OTHER; note = 2'-Omethylguanosine
  modified_base 50: mod_base = OTHER; note = Cytosine phosphorothiorate
  modified_base 51: mod_base = OTHER; note = 2'-Omethylguanosine
  modified_base 54: mod_base = OTHER; note = 2'-fluorouridine phosphorothiorate
  modified_base 57: mod_base = OTHER; note = 2'-Omethylguanosine phosphorothiorate
  modified_base 62: mod_base = OTHER; note = 2'-fluorocytosine
  modified_base 64: mod_base = OTHER; note = 2'-Omethylguanosine phosphorothiorate
  modified_base 65: mod_base = OTHER; note = 2'-Omethylguanosine phosphorothiorate
  modified_base 66: mod_base = OTHER; note = 2'-fluorocytosine phosphorothiorate
  modified_base 68: mod_base = OTHER; note = Guanosine phosphorothiorate
  modified_base 70: mod_base = OTHER; note = 2'-Omethylguanosine
  modified_base 72: mod_base = OTHER; note = 2'-Omethylcytosine
  modified_base 74: mod_base = OTHER; note = 2'-fluorocytosine
  modified_base 76: mod_base = OTHER; note = 2'-Omethyladenosine

SEQ ID NO: 9417 - RNA, 75 nt, synthetic construct; identical to SEQ ID NO: 1045
  source 1..75: mol_type = other RNA
  modified_base 1: mod_base = OTHER; note = 2'-Omethylguanosine
  modified_base 2: mod_base = OTHER; note = 2'-Omethylguanosine
  modified_base 3: mod_base = OTHER; note = 2'-Omethyluridine
  modified_base 4: mod_base = OTHER; note = 2'-Omethyluridine
  modified_base 5: mod_base = OTHER; note = 2'-Omethylcytosine
  modified_base 6: mod_base = OTHER; note = 2'-Omethylcytosine
  modified_base 60: mod_base = OTHER; note = 2'-Omethylcytosine
  modified_base 61: mod_base = OTHER; note = 2'-Omethyluridine
  modified_base 62: mod_base = OTHER; note = 2'-fluorocytosine
  modified_base 63: mod_base = OTHER; note = 2'-Omethylguanosine
  modified_base 64: mod_base = OTHER; note = 2'-Omethylguanosine
  modified_base 65: mod_base = OTHER; note = 2'-Omethyluridine
  modified_base 66: mod_base = OTHER; note = 2'-Omethylguanosine
  modified_base 67: mod_base = OTHER; note = 2'-Omethylguanosine
  modified_base 72: mod_base = OTHER; note = 2'-Omethyluridine

SEQ ID NO: 9418 - RNA, 76 nt, synthetic construct; identical to SEQ ID NO: 3332
  source 1..76: mol_type = other RNA
  modified_base 1: mod_base = OTHER; note = 2'-Omethylguanosine
  modified_base 13: mod_base = OTHER; note = 2'-Omethylcytosine
  modified_base 14: mod_base = OTHER; note = 2'-Omethyladenosine
  modified_base 15: mod_base = OTHER; note = 2'-Omethyladenosine
  modified_base 16: mod_base = OTHER; note = 2'-Omethyluridine
  modified_base 17: mod_base = OTHER; note = 2'-Omethylguanosine
  modified_base 18: mod_base = OTHER; note = 2'-Omethylguanosine
  modified_base 19: mod_base = OTHER; note = Adenosine phosphorothiorate
  modified_base 20: mod_base = OTHER; note = 2'-Omethyluridine
  modified_base 21: mod_base = OTHER; note = Adenosine phosphorothiorate
  modified_base 25: mod_base = OTHER; note = 2'-Omethylcytosine
  modified_base 41: mod_base = OTHER; note = 2'-fluorocytosine
  modified_base 42: mod_base = OTHER; note = 2'-Omethyladenosine
  modified_base 43: mod_base = OTHER; note = 2'-Omethyladenosine
  modified_base 44: mod_base = OTHER; note = 2'-fluoroadenosine
  modified_base 49: mod_base = OTHER; note = 2'-Omethylguanosine
  modified_base 50: mod_base = OTHER; note = 2'-Omethylcytosine
  modified_base 51: mod_base = OTHER; note = 2'-Omethylguanosine
  modified_base 52: mod_base = OTHER; note = 2'-Omethylguanosine
  modified_base 53: mod_base = OTHER; note = 2'-Omethylguanosine
  modified_base 54: mod_base = OTHER; note = Uridine phosphorothiorate
  modified_base 55: mod_base = OTHER; note = Uridine phosphorothiorate
  modified_base 61: mod_base = OTHER; note = 2'-Omethylcytosine
  modified_base 65: mod_base = OTHER; note = 2'-Omethylcytosine
  modified_base 73: mod_base = OTHER; note = 2'-Omethylguanosine

SEQ ID NO: 9419 - RNA, 75 nt, synthetic construct; identical to SEQ ID NO: 1045
  source 1..75: mol_type = other RNA
  modified_base 2: mod_base = OTHER; note = 2'-Omethylguanosine
  modified_base 15: mod_base = OTHER; note = 2'-Omethyladenosine
  modified_base 18: mod_base = OTHER; note = 2'-Omethylguanosine phosphorothiorate
  modified_base 26: mod_base = OTHER; note = 2'-Omethyluridine phosphorothiorate
  modified_base 27: mod_base = OTHER; note = 2'-Omethylcytosine phosphorothiorate
  modified_base 28: mod_base = OTHER; note = 2'-Omethyluridine phosphorothiorate
  modified_base 33: mod_base = OTHER; note = 2'-Omethyluridine
  modified_base 53: mod_base = OTHER; note = 2'-Omethyluridine phosphorothiorate
  modified_base 55: mod_base = OTHER; note = Cytosine phosphorothiorate
  modified_base 60: mod_base = OTHER; note = Cytosine phosphorothiorate
  modified_base 65: mod_base = OTHER; note = 2'-Omethyluridine phosphorothiorate
  modified_base 72: mod_base = OTHER; note = 2'-Omethyluridine
  modified_base 74: mod_base = OTHER; note = 2'-Omethylcytosine phosphorothiorate

SEQ ID NO: 9420 - RNA, 75 nt, synthetic construct; identical to SEQ ID NO: 1045
  source 1..75: mol_type = other RNA
  modified_base 2: mod_base = OTHER; note = 2'-Omethylguanosine phosphorothiorate
  modified_base 12: mod_base = OTHER; note = Guanosine phosphorothiorate
  modified_base 14: mod_base = OTHER; note = 2'-fluoroadenosine
  modified_base 21: mod_base = OTHER; note = 2'-fluoroadenosine
  modified_base 23: mod_base = OTHER; note = 2'-fluorocytosine
  modified_base 29: mod_base = OTHER; note = 2'-fluoroguanosine
  modified_base 42: mod_base = OTHER; note = 2'-fluoroadenosine
  modified_base 51: mod_base = OTHER; note = Adenosine phosphorothiorate
  modified_base 61: mod_base = OTHER; note = 2'-fluorouridine
  modified_base 62: mod_base = OTHER; note = Cytosine phosphorothiorate
  modified_base 66: mod_base = OTHER; note = Guanosine phosphorothiorate
  modified_base 73: mod_base = OTHER; note = Cytosine phosphorothiorate
  modified_base 74: mod_base = OTHER; note = 2'-Omethylcytosine

SEQ ID NO: 9421 - RNA, 76 nt, synthetic construct; identical to SEQ ID NO: 3318
  source 1..76: mol_type = other RNA
  modified_base 1: mod_base = OTHER; note = 2'-Omethylcytosine phosphorothiorate
  modified_base 2: mod_base = OTHER; note = 2'-Omethylcytosine phosphorothiorate
  modified_base 3: mod_base = OTHER; note = 2'-Omethyluridine
  modified_base 4: mod_base = OTHER; note = 2'-Omethyluridine
  modified_base 5: mod_base = OTHER; note = 2'-Omethylcytosine
  modified_base 6: mod_base = OTHER; note = 2'-Omethylguanosine
  modified_base 14: mod_base = OTHER; note = 2'-Omethyladenosine
  modified_base 18: mod_base = OTHER; note = 2'-Omethylguanosine
  modified_base 19: mod_base = OTHER; note = 2'-Omethylguanosine
  modified_base 22: mod_base = OTHER; note = 2'-Omethylguanosine
  modified_base 25: mod_base = OTHER; note = 2'-Omethylcytosine
  modified_base 27: mod_base = OTHER; note = 2'-Omethylguanosine
  modified_base 33: mod_base = OTHER; note = 2'-fluorouridine
  modified_base 41: mod_base = OTHER; note = 2'-Omethylcytosine
  modified_base 44: mod_base = OTHER; note = 2'-Omethyladenosine
  modified_base 45: mod_base = OTHER; note = 2'-Omethylguanosine
  modified_base 46: mod_base = OTHER; note = 2'-fluoroguanosine
  modified_base 47: mod_base = OTHER; note = 2'-fluorouridine
  modified_base 48: mod_base = OTHER; note = 2'-fluorocytosine
  modified_base 52: mod_base = OTHER; note = 2'-Omethylguanosine
  modified_base 55: mod_base = OTHER; note = Uridine phosphorothiorate
  modified_base 71: mod_base = OTHER; note = 2'-Omethylguanosine
  modified_base 73: mod_base = OTHER; note = 2'-Omethyladenosine

SEQ ID NO: 9422 - RNA, 76 nt, synthetic construct; identical to SEQ ID NO: 3795
  source 1..76: mol_type = other RNA
  modified_base 1: mod_base = OTHER; note = 2'-Omethylguanosine phosphorothiorate
  modified_base 2: mod_base = OTHER; note = 2'-Omethylcytosine
  modified_base 3: mod_base = OTHER; note = 2'-Omethylcytosine
  modified_base 4: mod_base = OTHER; note = 2'-Omethyluridine
  modified_base 5: mod_base = OTHER; note = 2'-Omethylcytosine
  modified_base 6: mod_base = OTHER; note = 2'-Omethylcytosine
  modified_base 44: mod_base = OTHER; note = 2'-Omethylguanosine
  modified_base 45: mod_base = OTHER; note = 2'-Omethylguanosine
  modified_base 46: mod_base = OTHER; note = 2'-fluoroadenosine
  modified_base 47: mod_base = OTHER; note = 2'-fluorouridine
  modified_base 48: mod_base = OTHER; note = 2'-Omethyluridine
  modified_base 49: mod_base = OTHER; note = 2'-Omethylguanosine
  modified_base 73: mod_base = OTHER; note = 2'-Omethylguanosine

SEQ ID NO: 9423 - RNA, 76 nt, synthetic construct; identical to SEQ ID NO: 625
  source 1..76: mol_type = other RNA
  modified_base 1: mod_base = OTHER; note = 2'-Omethylguanosine phosphorothiorate
  modified_base 2: mod_base = OTHER; note = 2'-Omethylguanosine
  modified_base 13: mod_base = OTHER; note = 2'-Omethylcytosine
  modified_base 33: mod_base = OTHER; note = 2'-fluorouridine
  modified_base 35: mod_base = OTHER; note = Cytosine phosphorothiorate
  modified_base 37: mod_base = OTHER; note = Adenosine phosphorothiorate
  modified_base 38: mod_base = OTHER; note = Adenosine phosphorothiorate
  modified_base 52: mod_base = OTHER; note = 2'-Omethylguanosine
  modified_base 56: mod_base = OTHER; note = 2'-Omethylcytosine
  modified_base 62: mod_base = OTHER; note = 2'-Omethylcytosine
  modified_base 63: mod_base = OTHER; note = 2'-fluorocytosine
  modified_base 73: mod_base = OTHER; note = 2'-Omethylguanosine

SEQ ID NO: 9424 - RNA, 76 nt, synthetic construct; identical to SEQ ID NO: 625
  source 1..76: mol_type = other RNA
  modified_base 1: mod_base = OTHER; note = 2'-Omethylguanosine
  modified_base 2: mod_base = OTHER; note = 2'-Omethylguanosine
  modified_base 3: mod_base = OTHER; note = 2'-Omethylcytosine
  modified_base 4: mod_base = OTHER; note = 2'-Omethyluridine
  modified_base 5: mod_base = OTHER; note = 2'-Omethylcytosine
  modified_base 6: mod_base = OTHER; note = 2'-Omethylcytosine
  modified_base 10: mod_base = OTHER; note = 2'-Omethylguanosine
  modified_base 11: mod_base = OTHER; note = 2'-Omethylcytosine
  modified_base 12: mod_base = OTHER; note = 2'-Omethylguanosine phosphorothiorate
  modified_base 13: mod_base = OTHER; note = 2'-Omethylcytosine
  modified_base 14: mod_base = OTHER; note = 2'-Omethyladenosine
  modified_base 15: mod_base = OTHER; note = Adenosine phosphorothiorate
  modified_base 16: mod_base = OTHER; note = 2'-Omethyluridine
  modified_base 17: mod_base = OTHER; note = 2'-Omethylguanosine
  modified_base 18: mod_base = OTHER; note = 2'-Omethylguanosine
  modified_base 19: mod_base = OTHER; note = 2'-Omethyladenosine phosphorothiorate
  modified_base 21: mod_base = OTHER; note = 2'-fluoroadenosine phosphorothiorate
  modified_base 22: mod_base = OTHER; note = 2'-Omethylguanosine
  modified_base 23: mod_base = OTHER; note = 2'-Omethylcytosine
  modified_base 24: mod_base = OTHER; note = 2'-Omethylguanosine
  modified_base 26: mod_base = OTHER; note = Adenosine phosphorothiorate
  modified_base 28: mod_base = OTHER; note = 2'-Omethyluridine phosphorothiorate
  modified_base 29: mod_base = OTHER; note = 2'-Omethylguanosine
  modified_base 30: mod_base = OTHER; note = 2'-Omethylguanosine phosphorothiorate
  modified_base 31: mod_base = OTHER; note = 2'-Omethyladenosine phosphorothiorate
  modified_base 32: mod_base = OTHER; note = 2'-Omethylcytosine phosphorothiorate
  modified_base 33: mod_base = OTHER; note = 2'-fluorouridine
  modified_base 35: mod_base = OTHER; note = Cytosine phosphorothiorate
  modified_base 36: mod_base = OTHER; note = 2'-Omethyladenosine phosphorothiorate
  modified_base 37: mod_base = OTHER; note = 2'-Omethyladenosine phosphorothiorate
  modified_base 38: mod_base = OTHER; note = Adenosine phosphorothiorate
  modified_base 40: mod_base = OTHER; note = 2'-Omethyluridine
  modified_base 41: mod_base = OTHER; note = 2'-fluorocytosine
  modified_base 42: mod_base = OTHER; note = Adenosine phosphorothiorate
  modified_base 43: mod_base = OTHER; note = Adenosine phosphorothiorate
  modified_base 44: mod_base = OTHER; note = 2'-Omethyladenosine
  modified_base 45: mod_base = OTHER; note = Guanosine phosphorothiorate
  modified_base 49: mod_base = OTHER; note = 2'-Omethylcytosine
  modified_base 50: mod_base = OTHER; note = 2'-Omethylcytosine
  modified_base 52: mod_base = OTHER; note = 2'-Omethylguanosine
  modified_base 53: mod_base = OTHER; note = 2'-fluoroguanosine
  modified_base 56: mod_base = OTHER; note = 2'-Omethylcytosine
  modified_base 59: mod_base = OTHER; note = 2'-Omethylguanosine
  modified_base 62: mod_base = OTHER; note = 2'-Omethylcytosine phosphorothiorate
  modified_base 63: mod_base = OTHER; note = 2'-fluorocytosine
  modified_base 64: mod_base = OTHER; note = 2'-Omethylguanosine phosphorothiorate
  modified_base 66: mod_base = OTHER; note = 2'-Omethylcytosine phosphorothiorate
  modified_base 67: mod_base = OTHER; note = 2'-fluoroguanosine
  modified_base 69: mod_base = OTHER; note = 2'-fluoroadenosine
  modified_base 71: mod_base = OTHER; note = 2'-fluorouridine
  modified_base 73: mod_base = OTHER; note = 2'-Omethylguanosine
  modified_base 74: mod_base = OTHER; note = Cytosine phosphorothiorate
  modified_base 75: mod_base = OTHER; note = 2'-Omethylcytosine phosphorothiorate
  modified_base 76: mod_base = OTHER; note = 2'-fluoroadenosine

SEQ ID NO: 9425 - RNA, 73 nt, synthetic construct; identical to SEQ ID NO: 935
  source 1..73: mol_type = other RNA
  modified_base 1: mod_base = OTHER; note = 2'-Omethylguanosine phosphorothiorate
  modified_base 2: mod_base = OTHER; note = 2'-Omethylguanosine phosphorothiorate
  modified_base 18: mod_base = OTHER; note = 2'-fluoroguanosine

SEQ ID NO: 9426 - RNA, 85 nt, synthetic construct; identical to SEQ ID NO: 3297
  source 1..85: mol_type = other RNA
  modified_base 1: mod_base = OTHER; note = 2'-Omethylguanosine phosphorothiorate
  modified_base 13: mod_base = OTHER; note = 2'-fluoroguanosine
  modified_base 37: mod_base = OTHER; note = 2'-Omethyladenosine
  modified_base 53: mod_base = OTHER; note = 2'-Omethylcytosine phosphorothiorate
  modified_base 55: mod_base = OTHER; note = 2'-Omethylcytosine
  modified_base 80: mod_base = OTHER; note = 2'-Omethylguanosine
  modified_base 82: mod_base = OTHER; note = 2'-fluoroguanosine

SEQ ID NO: 9427 - RNA, 85 nt, synthetic construct; identical to SEQ ID NO: 3297
  source 1..85: mol_type = other RNA
  modified_base 1: mod_base = OTHER; note = 2'-Omethylguanosine
  modified_base 2: mod_base = OTHER; note = 2'-Omethylcytosine
  modified_base 3: mod_base = OTHER; note = 2'-Omethyluridine
  modified_base 4: mod_base = OTHER; note = 2'-Omethylguanosine
  modified_base 5: mod_base = OTHER; note = 2'-Omethyluridine
  modified_base 6: mod_base = OTHER; note = 2'-Omethylguanosine
  modified_base 13: mod_base = OTHER; note = 2'-Omethylguanosine
  modified_base 14: mod_base = OTHER; note = 2'-Omethyladenosine
  modified_base 15: mod_base = OTHER; note = 2'-Omethylguanosine
  modified_base 16: mod_base = OTHER; note = 2'-Omethyluridine
  modified_base 17: mod_base = OTHER; note = 2'-Omethylguanosine
  modified_base 18: mod_base = OTHER; note = 2'-Omethylguanosine
  modified_base 19: mod_base = OTHER; note = Uridine phosphorothiorate
  modified_base 20: mod_base = OTHER; note = 2'-Omethyluridine
  modified_base 21: mod_base = OTHER; note = Adenosine phosphorothiorate
  modified_base 25: mod_base = OTHER; note = 2'-Omethylcytosine
  modified_base 33: mod_base = OTHER; note = 2'-fluorouridine
  modified_base 34: mod_base = OTHER; note = 2'-Omethyluridine
  modified_base 35: mod_base = OTHER; note = Cytosine phosphorothiorate
  modified_base 37: mod_base = OTHER; note = Adenosine phosphorothiorate
  modified_base 38: mod_base = OTHER; note = Adenosine phosphorothiorate
  modified_base 58: mod_base = OTHER; note = 2'-Omethylguanosine
  modified_base 59: mod_base = OTHER; note = 2'-Omethylcytosine
  modified_base 60: mod_base = OTHER; note = 2'-Omethyladenosine
  modified_base 61: mod_base = OTHER; note = 2'-Omethylguanosine
  modified_base 62: mod_base = OTHER; note = 2'-Omethylguanosine
  modified_base 63: mod_base = OTHER; note = Uridine phosphorothiorate
  modified_base 64: mod_base = OTHER; note = Uridine phosphorothiorate
  modified_base 70: mod_base = OTHER; note = 2'-Omethylcytosine
  modified_base 74: mod_base = OTHER; note = 2'-Omethylcytosine
  modified_base 82: mod_base = OTHER; note = 2'-Omethylguanosine

SEQ ID NO: 9428 - RNA, 76 nt, synthetic construct; identical to SEQ ID NO: 625
  source 1..76: mol_type = other RNA
  modified_base 1: mod_base = OTHER; note = 2'-fluoroguanosine
  modified_base 3: mod_base = OTHER; note = Cytosine phosphorothiorate
  modified_base 4: mod_base = OTHER; note = 2'-Omethyluridine phosphorothiorate
  modified_base 9: mod_base = OTHER; note = Guanosine phosphorothiorate
  modified_base 11: mod_base = OTHER; note = 2'-fluorocytosine phosphorothiorate
  modified_base 12: mod_base = OTHER; note = 2'-fluoroguanosine
  modified_base 13: mod_base = OTHER; note = 2'-fluorocytosine
  modified_base 25: mod_base = OTHER; note = 2'-Omethylcytosine phosphorothiorate
  modified_base 26: mod_base = OTHER; note = Adenosine phosphorothiorate
  modified_base 27: mod_base = OTHER; note = 2'-fluorouridine
  modified_base 29: mod_base = OTHER; note = 2'-Omethylguanosine phosphorothiorate
  modified_base 30: mod_base = OTHER; note = 2'-Omethylguanosine phosphorothiorate
  modified_base 31: mod_base = OTHER; note = 2'-fluoroadenosine
  modified_base 32: mod_base = OTHER; note = 2'-fluorocytosine
  modified_base 39: mod_base = OTHER; note = 2'-fluorouridine
  modified_base 41: mod_base = OTHER; note = Cytosine phosphorothiorate
  modified_base 42: mod_base = OTHER; note = 2'-Omethyladenosine phosphorothiorate
  modified_base 45: mod_base = OTHER; note = Guanosine phosphorothiorate
  modified_base 46: mod_base = OTHER; note = 2'-Omethylguanosine
  modified_base 50: mod_base = OTHER; note = Cytosine phosphorothiorate
  modified_base 51: mod_base = OTHER; note = 2'-Omethylguanosine
  modified_base 52: mod_base = OTHER; note = Guanosine phosphorothiorate
  modified_base 57: mod_base = OTHER; note = 2'-fluoroguanosine
  modified_base 59: mod_base = OTHER; note = 2'-Omethylguanosine
  modified_base 60: mod_base = OTHER; note = 2'-fluorouridine
  modified_base 61: mod_base = OTHER; note = 2'-fluorocytosine phosphorothiorate
  modified_base 63: mod_base = OTHER; note = 2'-Omethylcytosine
  modified_base 64: mod_base = OTHER; note = 2'-fluoroguanosine
  modified_base 67: mod_base = OTHER; note = Guanosine phosphorothiorate
  modified_base 68: mod_base = OTHER; note = 2'-fluoroguanosine
  modified_base 75: mod_base = OTHER; note = 2'-fluorocytosine

SEQ ID NO: 9429 - RNA, 74 nt, synthetic construct; identical to SEQ ID NO: 3293
  source 1..74: mol_type = other RNA
  modified_base 1: mod_base = OTHER; note = Adenosine phosphorothiorate
  modified_base 2: mod_base = OTHER; note = Cytosine phosphorothiorate
  modified_base 4: mod_base = OTHER; note = 2'-fluorouridine
  modified_base 6: mod_base = OTHER; note = 2'-fluoroguanosine
  modified_base 8: mod_base = OTHER; note = Guanosine phosphorothiorate
  modified_base 9: mod_base = OTHER; note = 2'-fluoroguanosine
  modified_base 24: mod_base = OTHER; note = Guanosine phosphorothiorate
  modified_base 27: mod_base = OTHER; note = 2'-fluorouridine
  modified_base 42: mod_base = OTHER; note = Adenosine phosphorothiorate
  modified_base 43: mod_base = OTHER; note = 2'-fluoroguanosine
  modified_base 44: mod_base = OTHER; note = Guanosine phosphorothiorate
  modified_base 48: mod_base = OTHER; note = 2'-fluorocytosine
  modified_base 52: mod_base = OTHER; note = 2'-fluorouridine
  modified_base 62: mod_base = OTHER; note = Guanosine phosphorothiorate
  modified_base 72: mod_base = OTHER; note = 2'-fluorocytosine
  modified_base 73: mod_base = OTHER; note = 2'-Omethylcytosine

SEQ ID NO: 9430 - RNA, 85 nt, synthetic construct; identical to SEQ ID NO: 3286
  source 1..85: mol_type = other RNA
  modified_base 1: mod_base = OTHER; note = 2'-Omethylcytosine
  modified_base 3: mod_base = OTHER; note = 2'-fluoroadenosine phosphorothiorate
  modified_base 26: mod_base = OTHER; note = 2'-fluorouridine
  modified_base 28: mod_base = OTHER; note = 2'-fluoroguanosine phosphorothiorate
  modified_base 30: mod_base = OTHER; note = 2'-fluoroadenosine
  modified_base 34: mod_base = OTHER; note = 2'-fluorouridine
  modified_base 40: mod_base = OTHER; note = Cytosine phosphorothiorate
  modified_base 43: mod_base = OTHER; note = Uridine phosphorothiorate
  modified_base 45: mod_base = OTHER; note = 2'-fluoroguanosine
  modified_base 48: mod_base = OTHER; note = Adenosine phosphorothiorate
  modified_base 49: mod_base = OTHER; note = 2'-fluorouridine
  modified_base 54: mod_base = OTHER; note = 2'-fluorocytosine
  modified_base 55: mod_base = OTHER; note = 2'-Omethylcytosine
  modified_base 56: mod_base = OTHER; note = 2'-fluoroguanosine
  modified_base 57: mod_base = OTHER; note = 2'-Omethylcytosine
  modified_base 58: mod_base = OTHER; note = 2'-Omethylguanosine
  modified_base 60: mod_base = OTHER; note = 2'-fluoroguanosine phosphorothiorate
  modified_base 67: mod_base = OTHER; note = Adenosine phosphorothiorate
  modified_base 73: mod_base = OTHER; note = 2'-fluoroadenosine
  modified_base 84: mod_base = OTHER; note = 2'-fluorocytosine

SEQ ID NO: 9431 - RNA, 75 nt, synthetic construct; identical to SEQ ID NO: 1045
  source 1..75: mol_type = other RNA
  modified_base 1: mod_base = OTHER; note = 2'-Omethylguanosine
  modified_base 3: mod_base = OTHER; note = 2'-fluorouridine phosphorothiorate
  modified_base 4: mod_base = OTHER; note = 2'-Omethyluridine
  modified_base 8: mod_base = OTHER; note = Uridine phosphorothiorate
  modified_base 14: mod_base = OTHER; note = 2'-fluoroadenosine
  modified_base 21: mod_base = OTHER; note = Adenosine phosphorothiorate
  modified_base 22: mod_base = OTHER; note = 2'-fluoroguanosine
  modified_base 25: mod_base = OTHER; note = 2'-fluorocytosine
  modified_base 28: mod_base = OTHER; note = 2'-fluorouridine
  modified_base 41: mod_base = OTHER; note = 2'-fluorocytosine phosphorothiorate
  modified_base 44: mod_base = OTHER; note = 2'-fluorocytosine
  modified_base 45: mod_base = OTHER; note = 2'-fluoroguanosine
  modified_base 54: mod_base = OTHER; note = 2'-Omethyluridine
  modified_base 60: mod_base = OTHER; note = 2'-fluorocytosine
  modified_base 62: mod_base = OTHER; note = 2'-fluorocytosine
  modified_base 65: mod_base = OTHER; note = 2'-fluorouridine
  modified_base 68: mod_base = OTHER; note = Adenosine phosphorothiorate
  modified_base 74: mod_base = OTHER; note = 2'-fluorocytosine phosphorothiorate

SEQ ID NO: 9432 - RNA, 76 nt, synthetic construct; identical to SEQ ID NO: 625
  source 1..76: mol_type = other RNA
  modified_base 1: mod_base = OTHER; note = 2'-Omethylguanosine
  modified_base 2: mod_base = OTHER; note = 2'-Omethylguanosine
  modified_base 4: mod_base = OTHER; note = Uridine phosphorothiorate
  modified_base 5: mod_base = OTHER; note = 2'-fluorocytosine phosphorothiorate
  modified_base 6: mod_base = OTHER; note = 2'-Omethylcytosine
  modified_base 20: mod_base = OTHER; note = 2'-Omethyluridine
  modified_base 21: mod_base = OTHER; note = Adenosine phosphorothiorate
  modified_base 22: mod_base = OTHER; note = 2'-Omethylguanosine phosphorothiorate
  modified_base 23: mod_base = OTHER; note = 2'-Omethylcytosine
  modified_base 26: mod_base = OTHER; note = 2'-Omethyladenosine
  modified_base 28: mod_base = OTHER; note = Uridine phosphorothiorate
  modified_base 31: mod_base = OTHER; note = 2'-Omethyladenosine
  modified_base 32: mod_base = OTHER; note = 2'-fluorocytosine
  modified_base 33: mod_base = OTHER; note = 2'-fluorouridine phosphorothiorate
  modified_base 34: mod_base = OTHER; note = 2'-fluorouridine phosphorothiorate
  modified_base 36: mod_base = OTHER; note = Adenosine phosphorothiorate
  modified_base 37: mod_base = OTHER; note = Adenosine phosphorothiorate
  modified_base 39: mod_base = OTHER; note = 2'-Omethyluridine
  modified_base 41: mod_base = OTHER; note = 2'-Omethylcytosine
  modified_base 42: mod_base = OTHER; note = 2'-fluoroadenosine
  modified_base 43: mod_base = OTHER; note = 2'-fluoroadenosine
  modified_base 46: mod_base = OTHER; note = 2'-Omethylguanosine
  modified_base 54: mod_base = OTHER; note = 2'-fluorouridine
  modified_base 55: mod_base = OTHER; note = Uridine phosphorothiorate
  modified_base 56: mod_base = OTHER; note = 2'-Omethylcytosine
  modified_base 59: mod_base = OTHER; note = 2'-fluoroguanosine
  modified_base 60: mod_base = OTHER; note = 2'-fluorouridine
  modified_base 62: mod_base = OTHER; note = Cytosine phosphorothiorate
  modified_base 63: mod_base = OTHER; note = 2'-fluorocytosine
  modified_base 64: mod_base = OTHER; note = 2'-Omethylguanosine
  modified_base 69: mod_base = OTHER; note = Adenosine phosphorothiorate
  modified_base 70: mod_base = OTHER; note = 2'-Omethylguanosine
  modified_base 75: mod_base = OTHER; note = 2'-Omethylcytosine

SEQ ID NO: 9433 - RNA, 75 nt, synthetic construct; identical to SEQ ID NO: 3336
  source 1..75: mol_type = other RNA
  modified_base 1: mod_base = OTHER; note = 2'-Omethylcytosine phosphorothiorate
  modified_base 2: mod_base = OTHER; note = 2'-fluorocytosine phosphorothiorate
  modified_base 5: mod_base = OTHER; note = 2'-fluoroguanosine
  modified_base 6: mod_base = OTHER; note = 2'-Omethylguanosine phosphorothiorate
  modified_base 11: mod_base = OTHER; note = Uridine phosphorothiorate
  modified_base 15: mod_base = OTHER; note = 2'-fluorouridine
  modified_base 17: mod_base = OTHER; note = 2'-Omethylguanosine
  modified_base 21: mod_base = OTHER; note = Guanosine phosphorothiorate
  modified_base 24: mod_base = OTHER; note = 2'-fluorocytosine
  modified_base 25: mod_base = OTHER; note = 2'-fluoroadenosine
  modified_base 30: mod_base = OTHER; note = 2'-fluoroadenosine
  modified_base 33: mod_base = OTHER; note = 2'-Omethylcytosine phosphorothiorate
  modified_base 39: mod_base = OTHER; note = 2'-Omethylcytosine
  modified_base 40: mod_base = OTHER; note = 2'-fluorouridine
  modified_base 50: mod_base = OTHER; note = 2'-Omethylguanosine phosphorothiorate
  modified_base 61: mod_base = OTHER; note = Cytosine phosphorothiorate
  modified_base 64: mod_base = OTHER; note = 2'-fluoroguanosine
  modified_base 74: mod_base = OTHER; note = Cytosine phosphorothiorate

SEQ ID NO: 9434 - RNA, 85 nt, synthetic construct; identical to SEQ ID NO: 3317
  source 1..85: mol_type = other RNA
  modified_base 1: mod_base = OTHER; note = 2'-Omethylguanosine phosphorothiorate
  modified_base 3: mod_base = OTHER; note = 2'-Omethyluridine
  modified_base 5: mod_base = OTHER; note = 2'-Omethyluridine
  modified_base 35: mod_base = OTHER; note = 2'-fluorouridine phosphorothiorate
  modified_base 47: mod_base = OTHER; note = 2'-Omethylguanosine
  modified_base 83: mod_base = OTHER; note = 2'-Omethylcytosine phosphorothiorate

SEQ ID NO: 9435 - RNA, 76 nt, synthetic construct; identical to SEQ ID NO: 625
  source 1..76: mol_type = other RNA
  modified_base 1: mod_base = OTHER; note = Guanosine phosphorothiorate
  modified_base 2: mod_base = OTHER; note = 2'-Omethylguanosine
  modified_base 6: mod_base = OTHER; note = Cytosine phosphorothiorate
  modified_base 10: mod_base = OTHER; note = Guanosine phosphorothiorate
  modified_base 11: mod_base = OTHER; note = 2'-Omethylcytosine
  modified_base 12: mod_base = OTHER; note = 2'-Omethylguanosine
  modified_base 15: mod_base = OTHER; note = 2'-fluoroadenosine
  modified_base 17: mod_base = OTHER; note = 2'-Omethylguanosine
  modified_base 20: mod_base = OTHER; note = Uridine phosphorothiorate
  modified_base 23: mod_base = OTHER; note = 2'-Omethylcytosine
  modified_base 24: mod_base = OTHER; note = 2'-Omethylguanosine
  modified_base 29: mod_base = OTHER; note = 2'-Omethylguanosine
  modified_base 30: mod_base = OTHER; note = 2'-fluoroguanosine phosphorothiorate
  modified_base 31: mod_base = OTHER; note = 2'-fluoroadenosine
  modified_base 34: mod_base = OTHER; note = Uridine phosphorothiorate
  modified_base 38: mod_base = OTHER; note = 2'-Omethyladenosine
  modified_base 39: mod_base = OTHER; note = Uridine phosphorothiorate
  modified_base 41: mod_base = OTHER; note = 2'-Omethylcytosine phosphorothiorate
  modified_base 46: mod_base = OTHER; note = 2'-fluoroguanosine
  modified_base 49: mod_base = OTHER; note = 2'-Omethylcytosine phosphorothiorate
  modified_base 52: mod_base = OTHER; note = 2'-fluoroguanosine
  modified_base 57: mod_base = OTHER; note = Guanosine phosphorothiorate
  modified_base 60: mod_base = OTHER; note = 2'-Omethyluridine
  modified_base 65: mod_base = OTHER; note = Guanosine phosphorothiorate
  modified_base 66: mod_base = OTHER; note = 2'-Omethylcytosine
  modified_base 67: mod_base = OTHER; note = Guanosine phosphorothiorate
  modified_base 68: mod_base = OTHER; note = 2'-fluoroguanosine
  modified_base 70: mod_base = OTHER; note = 2'-Omethylguanosine
  modified_base 71: mod_base = OTHER; note = Uridine phosphorothiorate
  modified_base 74: mod_base = OTHER; note = 2'-Omethylcytosine
  modified_base 75: mod_base = OTHER; note = Cytosine phosphorothiorate

SEQ ID NO: 9436 - RNA, 85 nt, synthetic construct; identical to SEQ ID NO: 3286
  source 1..85: mol_type = other RNA
  modified_base 1: mod_base = OTHER; note = 2'-fluorocytosine
  modified_base 3: mod_base = OTHER; note = 2'-fluoroadenosine phosphorothiorate
  modified_base 5: mod_base = OTHER; note = 2'-fluoroguanosine
  modified_base 9: mod_base = OTHER; note = Guanosine phosphorothiorate
  modified_base 16: mod_base = OTHER; note = Guanosine phosphorothiorate
  modified_base 26: mod_base = OTHER; note = 2'-fluorouridine
  modified_base 27: mod_base = OTHER; note = 2'-Omethyluridine phosphorothiorate
  modified_base 28: mod_base = OTHER; note = 2'-fluoroguanosine
  modified_base 33: mod_base = OTHER; note = 2'-fluorouridine
  modified_base 35: mod_base = OTHER; note = 2'-fluoroadenosine phosphorothiorate
  modified_base 36: mod_base = OTHER; note = Guanosine phosphorothiorate
  modified_base 46: mod_base = OTHER; note = 2'-Omethyladenosine
  modified_base 51: mod_base = OTHER; note = Uridine phosphorothiorate
  modified_base 54: mod_base = OTHER; note = 2'-fluorocytosine
  modified_base 60: mod_base = OTHER; note = 2'-Omethylguanosine
  modified_base 75: mod_base = OTHER; note = 2'-fluorouridine
  modified_base 83: mod_base = OTHER; note = Cytosine phosphorothiorate
  modified_base 84: mod_base = OTHER; note = 2'-Omethylcytosine

SEQ ID NO: 9437 - RNA, 85 nt, synthetic construct; identical to SEQ ID NO: 3288
  source 1..85: mol_type = other RNA
  modified_base 28: mod_base = OTHER; note = 2'-fluoroguanosine
  modified_base 47: mod_base = OTHER; note = 2'-Omethylcytosine
  modified_base 58: mod_base = OTHER; note = 2'-fluoroguanosine
  modified_base 61: mod_base = OTHER; note = Guanosine phosphorothiorate
  modified_base 76: mod_base = OTHER; note = 2'-fluorocytosine

SEQ ID NO: 9438 - RNA, 76 nt, synthetic construct
  source 1..76: mol_type = other RNA
ggctccgaggcggaatggataccgcattggacttcaaattcaaaggttccgggttcgagtcccggcggagtcgcca

SEQ ID NO: 9439 - RNA, 86 nt, synthetic construct; identical to SEQ ID NO: 3290
  source 1..86: mol_type = other RNA
  modified_base 29: mod_base = OTHER; note = 2'-Omethylguanosine

SEQ ID NO: 9440 - RNA, 76 nt, synthetic construct; identical to SEQ ID NO: 625
  source 1..76: mol_type = other RNA
  modified_base 1: mod_base = OTHER; note = 2'-Omethylguanosine
  modified_base 10: mod_base = OTHER; note = 2'-Omethylguanosine
  modified_base 13: mod_base = OTHER; note = 2'-Omethylcytosine
  modified_base 17: mod_base = OTHER; note = Guanosine phosphorothiorate
  modified_base 18: mod_base = OTHER; note = 2'-Omethylguanosine
  modified_base 19: mod_base = OTHER; note = Adenosine phosphorothiorate
  modified_base 20: mod_base = OTHER; note = 2'-Omethyluridine
  modified_base 25: mod_base = OTHER; note = 2'-Omethylcytosine
  modified_base 29: mod_base = OTHER; note = 2'-Omethylguanosine
  modified_base 33: mod_base = OTHER; note = 2'-fluorouridine
  modified_base 35: mod_base = OTHER; note = Cytosine phosphorothiorate
  modified_base 37: mod_base = OTHER; note = Adenosine phosphorothiorate
  modified_base 38: mod_base = OTHER; note = Adenosine phosphorothiorate
  modified_base 43: mod_base = OTHER; note = 2'-Omethyladenosine
  modified_base 44: mod_base = OTHER; note = 2'-fluoroadenosine
  modified_base 46: mod_base = OTHER; note = Guanosine phosphorothiorate
  modified_base 50: mod_base = OTHER; note = 2'-Omethylcytosine
  modified_base 52: mod_base = OTHER; note = 2'-Omethylguanosine
  modified_base 54: mod_base = OTHER; note = Uridine phosphorothiorate
  modified_base 55: mod_base = OTHER; note = Uridine phosphorothiorate
  modified_base 56: mod_base = OTHER; note = 2'-Omethylcytosine
  modified_base 57: mod_base = OTHER; note = Guanosine phosphorothiorate
  modified_base 62: mod_base = OTHER; note = 2'-Omethylcytosine
  modified_base 63: mod_base = OTHER; note = 2'-fluorocytosine
  modified_base 65: mod_base = OTHER; note = 2'-Omethylguanosine
  modified_base 73: mod_base = OTHER; note = 2'-Omethylguanosine

SEQ ID NO: 9441 - RNA, 85 nt, synthetic construct; identical to SEQ ID NO: 3286
  source 1..85: mol_type = other RNA
  modified_base 1: mod_base = OTHER; note = 2'-Omethylcytosine
  modified_base 10: mod_base = OTHER; note = Cytosine phosphorothiorate
  modified_base 26: mod_base = OTHER; note = Uridine phosphorothiorate
  modified_base 32: mod_base = OTHER; note = 2'-fluorouridine
  modified_base 38: mod_base = OTHER; note = Uridine phosphorothiorate
  modified_base 48: mod_base = OTHER; note = 2'-Omethyladenosine
  modified_base 51: mod_base = OTHER; note = Uridine phosphorothiorate
  modified_base 57: mod_base = OTHER; note = 2'-Omethylcytosine
  modified_base 60: mod_base = OTHER; note = 2'-fluoroguanosine
  modified_base 64: mod_base = OTHER; note = 2'-Omethyluridine
  modified_base 81: mod_base = OTHER; note = 2'-fluorouridine phosphorothiorate

SEQ ID NO: 9442 - RNA, 76 nt, synthetic construct; identical to SEQ ID NO: 3289
  source 1..76: mol_type = other RNA
  modified_base 1: mod_base = OTHER; note = 2'-Omethylguanosine
  modified_base 20: mod_base = OTHER; note = 2'-Omethyluridine
  modified_base 21: mod_base = OTHER; note = 2'-fluoroadenosine
  modified_base 22: mod_base = OTHER; note = 2'-Omethylguanosine
  modified_base 40: mod_base = OTHER; note = 2'-fluorocytosine
  modified_base 41: mod_base = OTHER; note = 2'-Omethyluridine
  modified_base 42: mod_base = OTHER; note = 2'-Omethylguanosine
  modified_base 43: mod_base = OTHER; note = 2'-Omethyladenosine
  modified_base 73: mod_base = OTHER; note = 2'-Omethylguanosine

SEQ ID NO: 9443 - RNA, 76 nt, synthetic construct; identical to SEQ ID NO: 625
  source 1..76: mol_type = other RNA
  modified_base 1: mod_base = OTHER; note = 2'-Omethylguanosine
  modified_base 2: mod_base = OTHER; note = 2'-Omethylguanosine
  modified_base 3: mod_base = OTHER; note = 2'-fluorocytosine
  modified_base 4: mod_base = OTHER; note = 2'-fluorouridine
  modified_base 5: mod_base = OTHER; note = 2'-Omethylcytosine
  modified_base 6: mod_base = OTHER; note = Cytosine phosphorothiorate
  modified_base 10: mod_base = OTHER; note = 2'-fluoroguanosine phosphorothiorate
  modified_base 14: mod_base = OTHER; note = Adenosine phosphorothiorate
  modified_base 15: mod_base = OTHER; note = 2'-fluoroadenosine phosphorothiorate
  modified_base 16: mod_base = OTHER; note = 2'-fluorouridine
  modified_base 22: mod_base = OTHER; note = Guanosine phosphorothiorate
  modified_base 23: mod_base = OTHER; note = 2'-Omethylcytosine phosphorothiorate
  modified_base 24: mod_base = OTHER; note = 2'-Omethylguanosine
  modified_base 25: mod_base = OTHER; note = 2'-Omethylcytosine
  modified_base 28: mod_base = OTHER; note = 2'-fluorouridine
  modified_base 31: mod_base = OTHER; note = 2'-Omethyladenosine
  modified_base 34: mod_base = OTHER; note = 2'-Omethyluridine phosphorothiorate
  modified_base 36: mod_base = OTHER; note = Adenosine phosphorothiorate
  modified_base 38: mod_base = OTHER; note = 2'-Omethyladenosine
  modified_base 39: mod_base = OTHER; note = 2'-Omethyluridine phosphorothiorate
  modified_base 40: mod_base = OTHER; note = 2'-Omethyluridine
  modified_base 43: mod_base = OTHER; note = Adenosine phosphorothiorate
  modified_base 44: mod_base = OTHER; note = 2'-fluoroadenosine
  modified_base 48: mod_base = OTHER; note = 2'-fluorouridine
  modified_base 50: mod_base = OTHER; note = Cytosine phosphorothiorate
  modified_base 53: mod_base = OTHER; note = 2'-Omethylguanosine
  modified_base 56: mod_base = OTHER; note = 2'-fluorocytosine
  modified_base 64: mod_base = OTHER; note = 2'-fluoroguanosine
  modified_base 65: mod_base = OTHER; note = 2'-fluoroguanosine
  modified_base 68: mod_base = OTHER; note = Guanosine phosphorothiorate
  modified_base 69: mod_base = OTHER; note = 2'-Omethyladenosine
  modified_base 71: mod_base = OTHER; note = Uridine phosphorothiorate
  modified_base 72: mod_base = OTHER; note = 2'-fluorocytosine
  modified_base 74: mod_base = OTHER; note = 2'-Omethylcytosine
  modified_base 75: mod_base = OTHER; note = Cytosine phosphorothiorate
  modified_base 76: mod_base = OTHER; note = 2'-fluoroadenosine

SEQ ID NO: 9444 - RNA, 85 nt, synthetic construct; identical to SEQ ID NO: 3317
  source 1..85: mol_type = other RNA
  modified_base 1: mod_base = OTHER; note = 2'-Omethylguanosine phosphorothiorate
  modified_base 15: mod_base = OTHER; note = 2'-Omethylguanosine
  modified_base 35: mod_base = OTHER; note = 2'-fluorouridine
  modified_base 42: mod_base = OTHER; note = Adenosine phosphorothiorate
  modified_base 57: mod_base = OTHER; note = 2'-Omethylcytosine phosphorothiorate
  modified_base 60: mod_base = OTHER; note = 2'-fluoroadenosine
  modified_base 82: mod_base = OTHER; note = 2'-Omethylguanosine

SEQ ID NO: 9445 - RNA, 76 nt, synthetic construct; identical to SEQ ID NO: 625
  source 1..76: mol_type = other RNA
  modified_base 1: mod_base = OTHER; note = 2'-fluoroguanosine
  modified_base 3: mod_base = OTHER; note = 2'-Omethylcytosine
  modified_base 4: mod_base = OTHER; note = Uridine phosphorothiorate
  modified_base 5: mod_base = OTHER; note = 2'-Omethylcytosine
  modified_base 8: mod_base = OTHER; note = Uridine phosphorothiorate
  modified_base 10: mod_base = OTHER; note = Guanosine phosphorothiorate
  modified_base 16: mod_base = OTHER; note = Uridine phosphorothiorate
  modified_base 17: mod_base = OTHER; note = 2'-Omethylguanosine
  modified_base 18: mod_base = OTHER; note = Guanosine phosphorothiorate
  modified_base 29: mod_base = OTHER; note = 2'-Omethylguanosine
  modified_base 32: mod_base = OTHER; note = 2'-fluorocytosine
  modified_base 38: mod_base = OTHER; note = 2'-Omethyladenosine
  modified_base 40: mod_base = OTHER; note = 2'-Omethyluridine phosphorothiorate
  modified_base 41: mod_base = OTHER; note = 2'-fluorocytosine phosphorothiorate
  modified_base 42: mod_base = OTHER; note = Adenosine phosphorothiorate
  modified_base 43: mod_base = OTHER; note = 2'-fluoroadenosine
  modified_base 44: mod_base = OTHER; note = 2'-fluoroadenosine
  modified_base 45: mod_base = OTHER; note = 2'-fluoroguanosine
  modified_base 49: mod_base = OTHER; note = Cytosine phosphorothiorate
  modified_base 56: mod_base = OTHER; note = 2'-Omethylcytosine phosphorothiorate
  modified_base 59: mod_base = OTHER; note = 2'-fluoroguanosine
  modified_base 60: mod_base = OTHER; note = 2'-Omethyluridine
  modified_base 61: mod_base = OTHER; note = 2'-fluorocytosine
  modified_base 66: mod_base = OTHER; note = 2'-fluorocytosine phosphorothiorate
  modified_base 67: mod_base = OTHER; note = 2'-fluoroguanosine phosphorothiorate
  modified_base 68: mod_base = OTHER; note = 2'-Omethylguanosine
  modified_base 69: mod_base = OTHER; note = Adenosine phosphorothiorate
  modified_base 70: mod_base = OTHER; note = 2'-Omethylguanosine phosphorothiorate
  modified_base 71: mod_base = OTHER; note = 2'-Omethyluridine
  modified_base 72: mod_base = OTHER; note = Cytosine phosphorothiorate
  modified_base 75: mod_base = OTHER; note = 2'-fluorocytosine

SEQ ID NO: 9446 - RNA, 75 nt, synthetic construct; identical to SEQ ID NO: 3299
  source 1..75: mol_type = other RNA
  modified_base 1: mod_base = OTHER; note = Cytosine phosphorothiorate
  modified_base 5: mod_base = OTHER; note = 2'-fluoroguanosine
  modified_base 11: mod_base = OTHER; note = Uridine phosphorothiorate
  modified_base 14: mod_base = OTHER; note = Guanosine phosphorothiorate
  modified_base 15: mod_base = OTHER; note = 2'-fluorouridine
  modified_base 19: mod_base = OTHER; note = 2'-fluorouridine
  modified_base 20: mod_base = OTHER; note = 2'-Omethyladenosine phosphorothiorate
  modified_base 23: mod_base = OTHER; note = 2'-fluoroguanosine
  modified_base 26: mod_base = OTHER; note = Uridine phosphorothiorate
  modified_base 28: mod_base = OTHER; note = 2'-Omethyladenosine phosphorothiorate
  modified_base 35: mod_base = OTHER; note = 2'-Omethyladenosine
  modified_base 39: mod_base = OTHER; note = 2'-fluorocytosine
  modified_base 41: mod_base = OTHER; note = 2'-Omethylguanosine phosphorothiorate
  modified_base 46: mod_base = OTHER; note = 2'-fluorouridine
  modified_base 48: mod_base = OTHER; note = 2'-fluorocytosine
  modified_base 49: mod_base = OTHER; note = 2'-fluoroadenosine
  modified_base 60: mod_base = OTHER; note = 2'-fluorocytosine
  modified_base 62: mod_base = OTHER; note = 2'-fluorocytosine
  modified_base 72: mod_base = OTHER; note = 2'-Omethylguanosine
  modified_base 73: mod_base = OTHER; note = Cytosine phosphorothiorate
  modified_base 74: mod_base = OTHER; note = Cytosine phosphorothiorate

SEQ ID NO: 9447 - RNA, 76 nt, synthetic construct; identical to SEQ ID NO: 625
  source 1..76: mol_type = other RNA
  modified_base 1: mod_base = OTHER; note = 2'-Omethylguanosine
  modified_base 10: mod_base = OTHER; note = 2'-Omethylguanosine
  modified_base 13: mod_base = OTHER; note = 2'-Omethylcytosine
  modified_base 17: mod_base = OTHER; note = Guanosine phosphorothiorate
  modified_base 18: mod_base = OTHER; note = 2'-Omethylguanosine
  modified_base 19: mod_base = OTHER; note = Adenosine phosphorothiorate
  modified_base 20: mod_base = OTHER; note = 2'-Omethyluridine
  modified_base 25: mod_base = OTHER; note = 2'-Omethylcytosine
  modified_base 29: mod_base = OTHER; note = 2'-Omethylguanosine
  modified_base 33: mod_base = OTHER; note = 2'-fluorouridine
  modified_base 35: mod_base = OTHER; note = Cytosine phosphorothiorate
  modified_base 37: mod_base = OTHER; note = Adenosine phosphorothiorate
  modified_base 38: mod_base = OTHER; note = Adenosine phosphorothiorate
  modified_base 43: mod_base = OTHER; note = 2'-Omethyladenosine
  modified_base 44: mod_base = OTHER; note = 2'-fluoroadenosine
  modified_base 46: mod_base = OTHER; note = Guanosine phosphorothiorate
  modified_base 50: mod_base = OTHER; note = 2'-Omethylcytosine
  modified_base 52: mod_base = OTHER; note = 2'-Omethylguanosine
  modified_base 54: mod_base = OTHER; note = Uridine phosphorothiorate
  modified_base 55: mod_base = OTHER; note = Uridine phosphorothiorate
  modified_base 56: mod_base = OTHER; note = 2'-Omethylcytosine
  modified_base 57: mod_base = OTHER; note = Guanosine phosphorothiorate
  modified_base 62: mod_base = OTHER; note = 2'-Omethylcytosine
  modified_base 63: mod_base = OTHER; note = 2'-Omethylcytosine phosphorothiorate
  modified_base 65: mod_base = OTHER; note = 2'-Omethylguanosine
  modified_base 71: mod_base = OTHER; note = 2'-Omethyluridine
  modified_base 73: mod_base = OTHER; note = 2'-Omethylguanosine

SEQ ID NO: 9448 - RNA, 85 nt, synthetic construct; identical to SEQ ID NO: 3301
  source 1..85: mol_type = other RNA
  modified_base 1: mod_base = OTHER; note = 2'-Omethylguanosine phosphorothiorate
  modified_base 13: mod_base = OTHER; note = Guanosine phosphorothiorate
  modified_base 16: mod_base = OTHER; note = 2'-Omethyluridine phosphorothiorate
  modified_base 19: mod_base = OTHER; note = Uridine phosphorothiorate
  modified_base 22: mod_base = OTHER; note = 2'-fluoroadenosine
  modified_base 24: mod_base = OTHER; note = 2'-fluoroguanosine phosphorothiorate
  modified_base 27: mod_base = OTHER; note = Uridine phosphorothiorate
  modified_base 40: mod_base = OTHER; note = Cytosine phosphorothiorate
  modified_base 45: mod_base = OTHER; note = 2'-Omethylguanosine phosphorothiorate
  modified_base 48: mod_base = OTHER; note = 2'-Omethylguanosine
  modified_base 52: mod_base = OTHER; note = 2'-fluorocytosine
  modified_base 59: mod_base = OTHER; note = 2'-Omethylcytosine
  modified_base 61: mod_base = OTHER; note = 2'-Omethylguanosine
  modified_base 70: mod_base = OTHER; note = 2'-fluorocytosine phosphorothiorate
  modified_base 73: mod_base = OTHER; note = 2'-fluoroguanosine
  modified_base 81: mod_base = OTHER; note = 2'-Omethylcytosine phosphorothiorate
  modified_base 83: mod_base = OTHER; note = Cytosine phosphorothiorate

SEQ ID NO: 9449 - RNA, 85 nt, synthetic construct; identical to SEQ ID NO: 3317
  source 1..85: mol_type = other RNA
  modified_base 1: mod_base = OTHER; note = 2'-Omethylguanosine phosphorothiorate
  modified_base 3: mod_base = OTHER; note = 2'-Omethyluridine phosphorothiorate
  modified_base 4: mod_base = OTHER; note = 2'-Omethylguanosine phosphorothiorate
  modified_base 9: mod_base = OTHER; note = 2'-fluoroguanosine
  modified_base 11: mod_base = OTHER; note = 2'-fluorocytosine
  modified_base 14: mod_base = OTHER; note = 2'-fluoroadenosine phosphorothiorate
  modified_base 15: mod_base = OTHER; note = 2'-fluoroguanosine
  modified_base 17: mod_base = OTHER; note = 2'-Omethylguanosine
  modified_base 18: mod_base = OTHER; note = 2'-Omethylguanosine
  modified_base 20: mod_base = OTHER; note = 2'-Omethyluridine
  modified_base 25: mod_base = OTHER; note = 2'-Omethylcytosine phosphorothiorate
  modified_base 26: mod_base = OTHER; note = 2'-fluoroguanosine
  modified_base 30: mod_base = OTHER; note = 2'-fluoroguanosine
  modified_base 35: mod_base = OTHER; note = Uridine phosphorothiorate
  modified_base 36: mod_base = OTHER; note = 2'-fluoroadenosine phosphorothiorate
  modified_base 44: mod_base = OTHER; note = 2'-Omethyluridine
  modified_base 46: mod_base = OTHER; note = 2'-Omethylguanosine
  modified_base 56: mod_base = OTHER; note = 2'-fluoroguanosine
  modified_base 57: mod_base = OTHER; note = 2'-Omethylcytosine
  modified_base 59: mod_base = OTHER; note = 2'-Omethylcytosine
  modified_base 82: mod_base = OTHER; note = Guanosine phosphorothiorate

SEQ ID NO: 9450 - RNA, 76 nt, synthetic construct; identical to SEQ ID NO: 625
  source 1..76: mol_type = other RNA
  modified_base 1: mod_base = OTHER; note = 2'-Omethylguanosine phosphorothiorate
  modified_base 2: mod_base = OTHER; note = 2'-Omethylguanosine
  modified_base 17: mod_base = OTHER; note = 2'-Omethylguanosine
  modified_base 33: mod_base = OTHER; note = 2'-fluorouridine
  modified_base 35: mod_base = OTHER; note = Cytosine phosphorothiorate
  modified_base 37: mod_base = OTHER; note = Adenosine phosphorothiorate
  modified_base 38: mod_base = OTHER; note = Adenosine phosphorothiorate
  modified_base 52: mod_base = OTHER; note = 2'-Omethylguanosine
  modified_base 62: mod_base = OTHER; note = 2'-Omethylcytosine
  modified_base 65: mod_base = OTHER; note = 2'-Omethylguanosine
  modified_base 73: mod_base = OTHER; note = 2'-Omethylguanosine
  modified_base 75: mod_base = OTHER; note = 2'-fluorocytosine phosphorothiorate

SEQ ID NO: 9451 - RNA, 76 nt, synthetic construct; identical to SEQ ID NO: 625
  source 1..76: mol_type = other RNA
  modified_base 1: mod_base = OTHER; note = 2'-Omethylguanosine phosphorothiorate
  modified_base 2: mod_base = OTHER; note = 2'-Omethylguanosine
  modified_base 11: mod_base = OTHER; note = 2'-fluorocytosine
  modified_base 15: mod_base = OTHER; note = 2'-fluoroadenosine
  modified_base 24: mod_base = OTHER; note = Guanosine phosphorothiorate
  modified_base 56: mod_base = OTHER; note = 2'-fluorocytosine
  modified_base 64: mod_base = OTHER; note = 2'-Omethylguanosine
  modified_base 68: mod_base = OTHER; note = Guanosine phosphorothiorate
  modified_base 69: mod_base = OTHER; note = 2'-fluoroadenosine
  modified_base 74: mod_base = OTHER; note = 2'-O-(2-Methoxyethyl) 5-methylcytosine phosphorothiorate
  modified_base 75: mod_base = OTHER; note = 2'-Omethylcytosine phosphorothiorate
  modified_base 76: mod_base = OTHER; note = 2'-Omethyladenosine

SEQ ID NO: 9452 - RNA, 76 nt, synthetic construct; identical to SEQ ID NO: 625
  source 1..76: mol_type = other RNA
  modified_base 1: mod_base = OTHER; note = 2'-Omethylguanosine
  modified_base 13: mod_base = OTHER; note = 2'-Omethylcytosine
  modified_base 17: mod_base = OTHER; note = Guanosine phosphorothiorate
  modified_base 18: mod_base = OTHER; note = 2'-Omethylguanosine
  modified_base 19: mod_base = OTHER; note = Adenosine phosphorothiorate
  modified_base 20: mod_base = OTHER; note = 2'-Omethyluridine
  modified_base 25: mod_base = OTHER; note = 2'-Omethylcytosine
  modified_base 29: mod_base = OTHER; note = 2'-Omethylguanosine
  modified_base 33: mod_base = OTHER; note = 2'-fluorouridine
  modified_base 35: mod_base = OTHER; note = Cytosine phosphorothiorate
  modified_base 37: mod_base = OTHER; note = Adenosine phosphorothiorate
  modified_base 38: mod_base = OTHER; note = Adenosine phosphorothiorate
  modified_base 41: mod_base = OTHER; note = 2'-fluorocytosine phosphorothiorate
  modified_base 43: mod_base = OTHER; note = 2'-Omethyladenosine
  modified_base 44: mod_base = OTHER; note = 2'-fluoroadenosine
  modified_base 46: mod_base = OTHER; note = Guanosine phosphorothiorate
  modified_base 50: mod_base = OTHER; note = 2'-Omethylcytosine
  modified_base 52: mod_base = OTHER; note = 2'-Omethylguanosine
  modified_base 54: mod_base = OTHER; note = Uridine phosphorothiorate
  modified_base 55: mod_base = OTHER; note = Uridine phosphorothiorate
  modified_base 56: mod_base = OTHER; note = 2'-Omethylcytosine
  modified_base 57: mod_base = OTHER; note = Guanosine phosphorothiorate
  modified_base 62: mod_base = OTHER; note = 2'-Omethylcytosine
  modified_base 63: mod_base = OTHER; note = 2'-fluorocytosine
  modified_base 65: mod_base = OTHER; note = 2'-Omethylguanosine
  modified_base 73: mod_base = OTHER; note = 2'-Omethylguanosine

SEQ ID NO: 9453 - RNA, 75 nt, synthetic construct; identical to SEQ ID NO: 3299
  source 1..75: mol_type = other RNA
  modified_base 2: mod_base = OTHER; note = 2'-Omethylcytosine phosphorothiorate
  modified_base 20: mod_base = OTHER; note = 2'-fluoroadenosine
  modified_base 21: mod_base = OTHER; note = 2'-fluoroguanosine
  modified_base 28: mod_base = OTHER; note = 2'-Omethyladenosine phosphorothiorate
  modified_base 37: mod_base = OTHER; note = 2'-fluoroadenosine
  modified_base 53: mod_base = OTHER; note = 2'-Omethyluridine phosphorothiorate
  modified_base 62: mod_base = OTHER; note = 2'-fluorocytosine
  modified_base 74: mod_base = OTHER; note = Cytosine phosphorothiorate

SEQ ID NO: 9454 - RNA, 85 nt, synthetic construct; identical to SEQ ID NO: 3301
  source 1..85: mol_type = other RNA
  modified_base 1: mod_base = OTHER; note = 2'-Omethylguanosine phosphorothiorate
  modified_base 2: mod_base = OTHER; note = Cytosine phosphorothiorate
  modified_base 14: mod_base = OTHER; note = 2'-Omethyladenosine phosphorothiorate
  modified_base 16: mod_base = OTHER; note = Uridine phosphorothiorate
  modified_base 24: mod_base = OTHER; note = 2'-fluoroguanosine
  modified_base 31: mod_base = OTHER; note = 2'-fluoroadenosine phosphorothiorate
  modified_base 33: mod_base = OTHER; note = 2'-fluorouridine
  modified_base 43: mod_base = OTHER; note = 2'-fluoroadenosine phosphorothiorate
  modified_base 48: mod_base = OTHER; note = 2'-fluoroguanosine phosphorothiorate
  modified_base 57: mod_base = OTHER; note = Cytosine phosphorothiorate
  modified_base 61: mod_base = OTHER; note = 2'-Omethylguanosine
  modified_base 62: mod_base = OTHER; note = 2'-Omethylguanosine
  modified_base 73: mod_base = OTHER; note = 2'-fluoroguanosine
  modified_base 82: mod_base = OTHER; note = Guanosine phosphorothiorate
  modified_base 84: mod_base = OTHER; note = 2'-fluorocytosine

SEQ ID NO: 9455 - RNA, 76 nt, synthetic construct; identical to SEQ ID NO: 3675
  source 1..76: mol_type = other RNA
  modified_base 1: mod_base = OTHER; note = 2'-Omethylguanosine
  modified_base 61: mod_base = OTHER; note = 2'-Omethylcytosine
  modified_base 62: mod_base = OTHER; note = 2'-Omethylcytosine
  modified_base 64: mod_base = OTHER; note = 2'-Omethylguanosine
  modified_base 65: mod_base = OTHER; note = 2'-Omethylguanosine
  modified_base 66: mod_base = OTHER; note = 2'-Omethylcytosine
  modified_base 67: mod_base = OTHER; note = 2'-Omethylguanosine
  modified_base 68: mod_base = OTHER; note = 2'-Omethylguanosine
  modified_base 69: mod_base = OTHER; note = 2'-Omethyladenosine
  modified_base 70: mod_base = OTHER; note = 2'-fluoroguanosine
  modified_base 71: mod_base = OTHER; note = 2'-Omethylguanosine
  modified_base 72: mod_base = OTHER; note = 2'-Omethylcytosine
  modified_base 73: mod_base = OTHER; note = 2'-Omethylguanosine

SEQ ID NO: 9456 - RNA, 75 nt, synthetic construct; identical to SEQ ID NO: 3336
  source 1..75: mol_type = other RNA
  modified_base 1: mod_base = OTHER; note = 2'-fluorocytosine phosphorothiorate
  modified_base 3: mod_base = OTHER; note = 2'-Omethyluridine
  modified_base 12: mod_base = OTHER; note = 2'-fluorocytosine
  modified_base 13: mod_base = OTHER; note = 2'-fluoroadenosine
  modified_base 20: mod_base = OTHER; note = 2'-fluoroadenosine
  modified_base 24: mod_base = OTHER; note = 2'-fluorocytosine
  modified_base 26: mod_base = OTHER; note = Uridine phosphorothiorate
  modified_base 30: mod_base = OTHER; note = 2'-fluoroadenosine
  modified_base 37: mod_base = OTHER; note = 2'-fluoroadenosine
  modified_base 39: mod_base = OTHER; note = 2'-Omethylcytosine phosphorothiorate
  modified_base 40: mod_base = OTHER; note = 2'-fluorouridine
  modified_base 41: mod_base = OTHER; note = 2'-fluoroguanosine
  modified_base 47: mod_base = OTHER; note = Cytosine phosphorothiorate
  modified_base 49: mod_base = OTHER; note = 2'-Omethyladenosine
  modified_base 56: mod_base = OTHER; note = 2'-Omethyladenosine
  modified_base 58: mod_base = OTHER; note = 2'-Omethylguanosine phosphorothiorate
  modified_base 61: mod_base = OTHER; note = 2'-fluorocytosine
  modified_base 65: mod_base = OTHER; note = Uridine phosphorothiorate
  modified_base 71: mod_base = OTHER; note = Cytosine phosphorothiorate
  modified_base 74: mod_base = OTHER; note = Cytosine phosphorothiorate

SEQ ID NO: 9457 - RNA, 76 nt, synthetic construct; identical to SEQ ID NO: 625
  source 1..76: mol_type = other RNA
  modified_base 1: mod_base = OTHER; note = 2'-Omethylguanosine phosphorothiorate
  modified_base 2: mod_base = OTHER; note = 2'-Omethylguanosine
  modified_base 3: mod_base = OTHER; note = 2'-Omethylcytosine
  modified_base 4: mod_base = OTHER; note = 2'-Omethyluridine
  modified_base 5: mod_base = OTHER; note = 2'-Omethylcytosine
  modified_base 6: mod_base = OTHER; note = 2'-Omethylcytosine
  modified_base 10: mod_base = OTHER; note = 2'-Omethylguanosine
  modified_base 11: mod_base = OTHER; note = 2'-Omethylcytosine
  modified_base 12: mod_base = OTHER; note = 2'-Omethylguanosine
  modified_base 13: mod_base = OTHER; note = 2'-Omethylcytosine
  modified_base 40: mod_base = OTHER; note = 2'-fluorouridine
  modified_base 41: mod_base = OTHER; note = 2'-fluorocytosine
  modified_base 42: mod_base = OTHER; note = 2'-fluoroadenosine
  modified_base 43: mod_base = OTHER; note = 2'-fluoroadenosine
  modified_base 49: mod_base = OTHER; note = 2'-Omethylcytosine
  modified_base 50: mod_base = OTHER; note = 2'-Omethylcytosine
  modified_base 51: mod_base = OTHER; note = 2'-Omethylguanosine
  modified_base 52: mod_base = OTHER; note = 2'-Omethylguanosine
  modified_base 53: mod_base = OTHER; note = 2'-Omethylguanosine
  modified_base 54: mod_base = OTHER; note = Uridine phosphorothiorate
  modified_base 55: mod_base = OTHER; note = Uridine phosphorothiorate
  modified_base 56: mod_base = OTHER; note = Cytosine phosphorothiorate
  modified_base 57: mod_base = OTHER; note = Guanosine phosphorothiorate
  modified_base 61: mod_base = OTHER; note = 2'-Omethylcytosine
  modified_base 62: mod_base = OTHER; note = 2'-Omethylcytosine
  modified_base 63: mod_base = OTHER; note = 2'-fluorocytosine
  modified_base 64: mod_base = OTHER; note = 2'-Omethylguanosine
  modified_base 65: mod_base = OTHER; note = 2'-Omethylguanosine
  modified_base 66: mod_base = OTHER; note = 2'-Omethylcytosine
  modified_base 67: mod_base = OTHER; note = 2'-Omethylguanosine
  modified_base 68: mod_base = OTHER; note = 2'-Omethylguanosine
  modified_base 69: mod_base = OTHER; note = 2'-Omethyladenosine
  modified_base 71: mod_base = OTHER; note = 2'-Omethyluridine
  modified_base 72: mod_base = OTHER; note = 2'-Omethylcytosine

SEQ ID NO: 9458 - RNA, 86 nt, synthetic construct; identical to SEQ ID NO: 3290
  source 1..86: mol_type = other RNA
  modified_base 59: mod_base = OTHER; note = 2'-Omethylguanosine
  modified_base 60: mod_base = OTHER; note = 2'-Omethyluridine
  modified_base 61: mod_base = OTHER; note = 2'-Omethylguanosine
  modified_base 62: mod_base = OTHER; note = 2'-Omethylguanosine
  modified_base 63: mod_base = OTHER; note = 2'-Omethylguanosine
  modified_base 83: mod_base = OTHER; note = 2'-Omethyladenosine

SEQ ID NO: 9459 - RNA, 75 nt, synthetic construct; identical to SEQ ID NO: 1045
  source 1..75: mol_type = other RNA
  modified_base 1: mod_base = OTHER; note = 2'-Omethylguanosine
  modified_base 13: mod_base = OTHER; note = 2'-Omethyluridine
  modified_base 14: mod_base = OTHER; note = 2'-Omethyladenosine
  modified_base 15: mod_base = OTHER; note = 2'-Omethyladenosine
  modified_base 16: mod_base = OTHER; note = 2'-Omethyluridine
  modified_base 17: mod_base = OTHER; note = 2'-Omethylguanosine
  modified_base 18: mod_base = OTHER; note = 2'-Omethylguanosine
  modified_base 19: mod_base = OTHER; note = Uridine phosphorothiorate
  modified_base 20: mod_base = OTHER; note = 2'-Omethyladenosine
  modified_base 21: mod_base = OTHER; note = Adenosine phosphorothiorate
  modified_base 25: mod_base = OTHER; note = 2'-Omethylcytosine
  modified_base 33: mod_base = OTHER; note = 2'-fluorouridine
  modified_base 34: mod_base = OTHER; note = 2'-Omethyluridine
  modified_base 35: mod_base = OTHER; note = Uridine phosphorothiorate
  modified_base 37: mod_base = OTHER; note = Adenosine phosphorothiorate
  modified_base 38: mod_base = OTHER; note = Adenosine phosphorothiorate
  modified_base 48: mod_base = OTHER; note = 2'-Omethylcytosine
  modified_base 49: mod_base = OTHER; note = 2'-Omethylcytosine
  modified_base 51: mod_base = OTHER; note = 2'-Omethyladenosine
  modified_base 53: mod_base = OTHER; note = Uridine phosphorothiorate
  modified_base 54: mod_base = OTHER; note = Uridine phosphorothiorate
  modified_base 55: mod_base = OTHER; note = 2'-Omethylcytosine
  modified_base 56: mod_base = OTHER; note = Guanosine phosphorothiorate
  modified_base 57: mod_base = OTHER; note = Adenosine phosphorothiorate
  modified_base 58: mod_base = OTHER; note = 2'-Omethylguanosine
  modified_base 60: mod_base = OTHER; note = 2'-Omethylcytosine
  modified_base 64: mod_base = OTHER; note = 2'-Omethylguanosine
  modified_base 72: mod_base = OTHER; note = 2'-Omethyluridine

SEQ ID NO: 9460 - RNA, 86 nt, synthetic construct; identical to SEQ ID NO: 3290
  source 1..86: mol_type = other RNA
  modified_base 1: mod_base = OTHER; note = 2'-Omethyladenosine
  modified_base 17: mod_base = OTHER; note = 2'-Omethylguanosine
  modified_base 18: mod_base = OTHER; note = 2'-Omethylguanosine
  modified_base 33: mod_base = OTHER; note = Uridine phosphorothiorate
  modified_base 34: mod_base = OTHER; note = 2'-Omethyluridine
  modified_base 35: mod_base = OTHER; note = Cytosine phosphorothiorate
  modified_base 36: mod_base = OTHER; note = Adenosine phosphorothiorate
  modified_base 37: mod_base = OTHER; note = Guanosine phosphorothiorate
  modified_base 38: mod_base = OTHER; note = Adenosine phosphorothiorate
  modified_base 60: mod_base = OTHER; note = 2'-Omethyluridine
  modified_base 62: mod_base = OTHER; note = 2'-Omethylguanosine
  modified_base 83: mod_base = OTHER; note = 2'-Omethyladenosine

SEQ ID NO: 9461 - RNA, 76 nt, synthetic construct; identical to SEQ ID NO: 625
  source 1..76: mol_type = other RNA
  modified_base 1: mod_base = OTHER; note = 2'-Omethylguanosine
  modified_base 10: mod_base = OTHER; note = 2'-Omethylguanosine
  modified_base 13: mod_base = OTHER; note = 2'-Omethylcytosine
  modified_base 17: mod_base = OTHER; note = Guanosine phosphorothiorate
  modified_base 18: mod_base = OTHER; note = 2'-Omethylguanosine
  modified_base 19: mod_base = OTHER; note = Adenosine phosphorothiorate
  modified_base 25: mod_base = OTHER; note = 2'-Omethylcytosine
  modified_base 29: mod_base = OTHER; note = 2'-Omethylguanosine
  modified_base 33: mod_base = OTHER; note = 2'-fluorouridine
  modified_base 35: mod_base = OTHER; note = Cytosine phosphorothiorate
  modified_base 37: mod_base = OTHER; note = Adenosine phosphorothiorate
  modified_base 38: mod_base = OTHER; note = Adenosine phosphorothiorate
  modified_base 43: mod_base = OTHER; note = 2'-Omethyladenosine
  modified_base 44: mod_base = OTHER; note = 2'-fluoroadenosine
  modified_base 46: mod_base = OTHER; note = Guanosine phosphorothiorate
  modified_base 50: mod_base = OTHER; note = 2'-Omethylcytosine
  modified_base 52: mod_base = OTHER; note = 2'-Omethylguanosine
  modified_base 54: mod_base = OTHER; note = Uridine phosphorothiorate
  modified_base 55: mod_base = OTHER; note = Uridine phosphorothiorate
  modified_base 56: mod_base = OTHER; note = 2'-Omethylcytosine
  modified_base 57: mod_base = OTHER; note = Guanosine phosphorothiorate
  modified_base 62: mod_base = OTHER; note = 2'-Omethylcytosine
  modified_base 63: mod_base = OTHER; note = 2'-fluorocytosine
  modified_base 65: mod_base = OTHER; note = 2'-Omethylguanosine
  modified_base 71: mod_base = OTHER; note = 2'-Omethyluridine
  modified_base 73: mod_base = OTHER; note = 2'-Omethylguanosine

SEQ ID NO: 9462 - RNA, 76 nt, synthetic construct; identical to SEQ ID NO: 625
  source 1..76: mol_type = other RNA
  modified_base 2: mod_base = OTHER; note = 2'-Omethylguanosine
  modified_base 4: mod_base = OTHER; note = Uridine phosphorothiorate
  modified_base 5: mod_base = OTHER; note = 2'-fluorocytosine
  modified_base 6: mod_base = OTHER; note = 2'-fluorocytosine
  modified_base 11: mod_base = OTHER; note = Cytosine phosphorothiorate
  modified_base 12: mod_base = OTHER; note = 2'-fluoroguanosine
  modified_base 13: mod_base = OTHER; note = 2'-fluorocytosine
  modified_base 15: mod_base = OTHER; note = 2'-Omethyladenosine
  modified_base 17: mod_base = OTHER; note = 2'-Omethylguanosine
  modified_base 18: mod_base = OTHER; note = Guanosine phosphorothiorate
  modified_base 21: mod_base = OTHER; note = Adenosine phosphorothiorate
  modified_base 24: mod_base = OTHER; note = 2'-Omethylguanosine
  modified_base 26: mod_base = OTHER; note = 2'-Omethyladenosine
  modified_base 27: mod_base = OTHER; note = 2'-Omethyluridine
  modified_base 32: mod_base = OTHER; note = 2'-fluorocytosine
  modified_base 34: mod_base = OTHER; note = 2'-fluorouridine
  modified_base 38: mod_base = OTHER; note = 2'-fluoroadenosine
  modified_base 39: mod_base = OTHER; note = 2'-Omethyluridine
  modified_base 40: mod_base = OTHER; note = 2'-Omethyluridine
  modified_base 43: mod_base = OTHER; note = 2'-Omethyladenosine
  modified_base 44: mod_base = OTHER; note = 2'-fluoroadenosine
  modified_base 50: mod_base = OTHER; note = 2'-Omethylcytosine
  modified_base 52: mod_base = OTHER; note = 2'-fluoroguanosine
  modified_base 56: mod_base = OTHER; note = Cytosine phosphorothiorate
  modified_base 58: mod_base = OTHER; note = 2'-fluoroadenosine
  modified_base 60: mod_base = OTHER; note = Uridine phosphorothiorate
  modified_base 62: mod_base = OTHER; note = 2'-Omethylcytosine
  modified_base 66: mod_base = OTHER; note = 2'-fluorocytosine
  modified_base 67: mod_base = OTHER; note = Guanosine phosphorothiorate
  modified_base 68: mod_base = OTHER; note = 2'-fluoroguanosine
  modified_base 69: mod_base = OTHER; note = 2'-fluoroadenosine
  modified_base 71: mod_base = OTHER; note = Uridine phosphorothiorate
  modified_base 72: mod_base = OTHER; note = 2'-fluorocytosine
  modified_base 73: mod_base = OTHER; note = 2'-Omethylguanosine
  modified_base 74: mod_base = OTHER; note = 2'-fluorocytosine phosphorothiorate
  modified_base 75: mod_base = OTHER; note = 2'-Omethylcytosine
  modified_base 76: mod_base = OTHER; note = 2'-Omethyladenosine

SEQ ID NO: 9463 - RNA, 85 nt, synthetic construct; identical to SEQ ID NO: 3317
  source 1..85: mol_type = other RNA
  modified_base 1: mod_base = OTHER; note = 2'-Omethylguanosine phosphorothiorate
  modified_base 14: mod_base = OTHER; note = 2'-Omethyladenosine
  modified_base 28: mod_base = OTHER; note = 2'-fluorouridine phosphorothiorate
  modified_base 45: mod_base = OTHER; note = 2'-Omethylguanosine phosphorothiorate
  modified_base 61: mod_base = OTHER; note = Guanosine phosphorothiorate
  modified_base 80: mod_base = OTHER; note = 2'-fluoroguanosine phosphorothiorate

SEQ ID NO: 9464 - RNA, 76 nt, synthetic construct; identical to SEQ ID NO: 625
  source 1..76: mol_type = other RNA
  modified_base 1: mod_base = OTHER; note = 2'-Omethylguanosine
  modified_base 10: mod_base = OTHER; note = 2'-Omethylguanosine
  modified_base 13: mod_base = OTHER; note = 2'-Omethylcytosine
  modified_base 17: mod_base = OTHER; note = Guanosine phosphorothiorate
  modified_base 18: mod_base = OTHER; note = 2'-Omethylguanosine
  modified_base 19: mod_base = OTHER; note = Adenosine phosphorothiorate
  modified_base 20: mod_base = OTHER; note = 2'-Omethyluridine
  modified_base 25: mod_base = OTHER; note = 2'-Omethylcytosine
  modified_base 29: mod_base = OTHER; note = 2'-Omethylguanosine
  modified_base 33: mod_base = OTHER; note = 2'-fluorouridine
  modified_base 35: mod_base = OTHER; note = Cytosine phosphorothiorate
  modified_base 37: mod_base = OTHER; note = Adenosine phosphorothiorate
  modified_base 38: mod_base = OTHER; note = Adenosine phosphorothiorate
  modified_base 43: mod_base = OTHER; note = 2'-Omethyladenosine
  modified_base 44: mod_base = OTHER; note = 2'-fluoroadenosine
  modified_base 46: mod_base = OTHER; note = Guanosine phosphorothiorate
  modified_base 50: mod_base = OTHER; note = 2'-Omethylcytosine
  modified_base 52: mod_base = OTHER; note = 2'-Omethylguanosine
  modified_base 54: mod_base = OTHER; note = Uridine phosphorothiorate
  modified_base 55: mod_base = OTHER; note = Uridine phosphorothiorate
  modified_base 56: mod_base = OTHER; note = 2'-Omethylcytosine
  modified_base 57: mod_base = OTHER; note = Guanosine phosphorothiorate
  modified_base 62: mod_base = OTHER; note = 2'-Omethylcytosine
  modified_base 63: mod_base = OTHER; note = 2'-fluorocytosine
  modified_base 65: mod_base = OTHER; note = 2'-Omethylguanosine
  modified_base 67: mod_base = OTHER; note = 2'-fluoroguanosine
  modified_base 71: mod_base = OTHER; note = 2'-Omethyluridine
  modified_base 73: mod_base = OTHER; note = 2'-Omethylguanosine

SEQ ID NO: 9465 - RNA, 75 nt, synthetic construct; identical to SEQ ID NO: 3306
  source 1..75: mol_type = other RNA
  modified_base 1: mod_base = OTHER; note = 2'-Omethylguanosine
  modified_base 2: mod_base = OTHER; note = 2'-Omethyladenosine
  modified_base 3: mod_base = OTHER; note = 2'-Omethylcytosine
  modified_base 4: mod_base = OTHER; note = 2'-Omethylcytosine
  modified_base 5: mod_base = OTHER; note = 2'-Omethyluridine
  modified_base 6: mod_base = OTHER; note = 2'-Omethylcytosine
  modified_base 14: mod_base = OTHER; note = 2'-Omethyladenosine
  modified_base 15: mod_base = OTHER; note = 2'-Omethyladenosine
  modified_base 16: mod_base = OTHER; note = 2'-Omethylcytosine
  modified_base 17: mod_base = OTHER; note = 2'-Omethylguanosine
  modified_base 18: mod_base = OTHER; note = 2'-Omethylguanosine
  modified_base 24: mod_base = OTHER; note = 2'-Omethylcytosine
  modified_base 40: mod_base = OTHER; note = 2'-Omethyladenosine
  modified_base 41: mod_base = OTHER; note = 2'-Omethylguanosine
  modified_base 42: mod_base = OTHER; note = 2'-Omethyladenosine
  modified_base 43: mod_base = OTHER; note = 2'-Omethyladenosine
  modified_base 48: mod_base = OTHER; note = 2'-Omethylguanosine
  modified_base 49: mod_base = OTHER; note = 2'-Omethylcytosine
  modified_base 51: mod_base = OTHER; note = 2'-Omethyluridine
  modified_base 53: mod_base = OTHER; note = 2'-Omethyluridine
  modified_base 54: mod_base = OTHER; note = Uridine phosphorothiorate
  modified_base 55: mod_base = OTHER; note = 2'-Omethylcytosine
  modified_base 56: mod_base = OTHER; note = 2'-fluoroadenosine
  modified_base 58: mod_base = OTHER; note = 2'-Omethyladenosine
  modified_base 60: mod_base = OTHER; note = 2'-Omethylcytosine
  modified_base 64: mod_base = OTHER; note = 2'-Omethyluridine
  modified_base 72: mod_base = OTHER; note = 2'-Omethyladenosine

SEQ ID NO: 9466 - RNA, 76 nt, synthetic construct; identical to SEQ ID NO: 3295
  source 1..76: mol_type = other RNA
  modified_base 1: mod_base = OTHER; note = 2'-Omethylcytosine
  modified_base 2: mod_base = OTHER; note = 2'-fluorocytosine phosphorothiorate
  modified_base 27: mod_base = OTHER; note = 2'-Omethylguanosine
  modified_base 40: mod_base = OTHER; note = 2'-fluorocytosine
  modified_base 42: mod_base = OTHER; note = 2'-Omethyluridine phosphorothiorate
  modified_base 53: mod_base = OTHER; note = 2'-Omethylguanosine phosphorothiorate
  modified_base 54: mod_base = OTHER; note = 2'-Omethyluridine
  modified_base 64: mod_base = OTHER; note = 2'-fluoroguanosine

SEQ ID NO: 9467 - RNA, 85 nt, synthetic construct; identical to SEQ ID NO: 3288
  source 1..85: mol_type = other RNA
  modified_base 1: mod_base = OTHER; note = 2'-Omethylcytosine phosphorothiorate
  modified_base 11: mod_base = OTHER; note = Cytosine phosphorothiorate
  modified_base 28: mod_base = OTHER; note = 2'-fluoroguanosine
  modified_base 30: mod_base = OTHER; note = 2'-fluoroadenosine
  modified_base 36: mod_base = OTHER; note = Guanosine phosphorothiorate
  modified_base 46: mod_base = OTHER; note = 2'-Omethyladenosine
  modified_base 49: mod_base = OTHER; note = Uridine phosphorothiorate
  modified_base 64: mod_base = OTHER; note = Uridine phosphorothiorate
  modified_base 84: mod_base = OTHER; note = 2'-Omethylcytosine

SEQ ID NO: 9468 - RNA, 86 nt, synthetic construct; identical to SEQ ID NO: 3290
  source 1..86: mol_type = other RNA
  modified_base 80: mod_base = OTHER; note = Guanosine phosphorothiorate

SEQ ID NO: 9469 - RNA, 76 nt, synthetic construct; identical to SEQ ID NO: 625
  source 1..76: mol_type = other RNA
  modified_base 1: mod_base = OTHER; note = 2'-Omethylguanosine phosphorothiorate
  modified_base 2: mod_base = OTHER; note = 2'-Omethylguanosine
  modified_base 3: mod_base = OTHER; note = 2'-Omethylcytosine
  modified_base 4: mod_base = OTHER; note = 2'-Omethyluridine
  modified_base 5: mod_base = OTHER; note = 2'-Omethylcytosine
  modified_base 6: mod_base = OTHER; note = 2'-Omethylcytosine
  modified_base 17: mod_base = OTHER; note = 2'-Omethylguanosine
  modified_base 33: mod_base = OTHER; note = 2'-fluorouridine
  modified_base 35: mod_base = OTHER; note = Cytosine phosphorothiorate
  modified_base 37: mod_base = OTHER; note = Adenosine phosphorothiorate
  modified_base 38: mod_base = OTHER; note = Adenosine phosphorothiorate
  modified_base 49: mod_base = OTHER; note = 2'-Omethylcytosine
  modified_base 50: mod_base = OTHER; note = 2'-Omethylcytosine
  modified_base 51: mod_base = OTHER; note = 2'-Omethylguanosine
  modified_base 52: mod_base = OTHER; note = 2'-Omethylguanosine
  modified_base 53: mod_base = OTHER; note = 2'-Omethylguanosine
  modified_base 56: mod_base = OTHER; note = 2'-Omethylcytosine
  modified_base 61: mod_base = OTHER; note = 2'-Omethylcytosine
  modified_base 62: mod_base = OTHER; note = 2'-Omethylcytosine
  modified_base 63: mod_base = OTHER; note = 2'-fluorocytosine
  modified_base 64: mod_base = OTHER; note = 2'-Omethylguanosine
  modified_base 65: mod_base = OTHER; note = 2'-Omethylguanosine
  modified_base 66: mod_base = OTHER; note = 2'-Omethylcytosine
  modified_base 67: mod_base = OTHER; note = 2'-Omethylguanosine
  modified_base 68: mod_base = OTHER; note = 2'-Omethylguanosine
  modified_base 69: mod_base = OTHER; note = 2'-Omethyladenosine
  modified_base 71: mod_base = OTHER; note = 2'-Omethyluridine
  modified_base 72: mod_base = OTHER; note = 2'-Omethylcytosine
  modified_base 73: mod_base = OTHER; note = 2'-Omethylguanosine
  modified_base 75: mod_base = OTHER; note = 2'-fluorocytosine phosphorothiorate

SEQ ID NO: 9470 - RNA, 85 nt, synthetic construct; identical to SEQ ID NO: 3288
  source 1..85: mol_type = other RNA
  modified_base 1: mod_base = OTHER; note = 2'-Omethylcytosine
  modified_base 11: mod_base = OTHER; note = Cytosine phosphorothiorate
  modified_base 30: mod_base = OTHER; note = 2'-fluoroadenosine
  modified_base 38: mod_base = OTHER; note = Uridine phosphorothiorate
  modified_base 46: mod_base = OTHER; note = Adenosine phosphorothiorate
  modified_base 49: mod_base = OTHER; note = 2'-Omethyluridine
  modified_base 54: mod_base = OTHER; note = 2'-fluorocytosine
  modified_base 73: mod_base = OTHER; note = 2'-fluoroadenosine
  modified_base 77: mod_base = OTHER; note = Cytosine phosphorothiorate
  modified_base 84: mod_base = OTHER; note = 2'-Omethylcytosine

SEQ ID NO: 9471 - RNA, 76 nt, synthetic construct; identical to SEQ ID NO: 3289
  source 1..76: mol_type = other RNA
  modified_base 1: mod_base = OTHER; note = 2'-Omethylguanosine phosphorothiorate
  modified_base 2: mod_base = OTHER; note = 2'-Omethylcytosine
  modified_base 3: mod_base = OTHER; note = 2'-Omethylcytosine
  modified_base 4: mod_base = OTHER; note = 2'-Omethyluridine
  modified_base 5: mod_base = OTHER; note = 2'-Omethylguanosine
  modified_base 6: mod_base = OTHER; note = 2'-Omethylguanosine
  modified_base 49: mod_base = OTHER; note = 2'-Omethylcytosine
  modified_base 50: mod_base = OTHER; note = 2'-Omethyladenosine
  modified_base 51: mod_base = OTHER; note = 2'-Omethylguanosine
  modified_base 52: mod_base = OTHER; note = 2'-Omethylguanosine
  modified_base 53: mod_base = OTHER; note = 2'-Omethylguanosine
  modified_base 61: mod_base = OTHER; note = 2'-Omethylcytosine
  modified_base 62: mod_base = OTHER; note = 2'-Omethylcytosine
  modified_base 63: mod_base = OTHER; note = 2'-fluorocytosine
  modified_base 64: mod_base = OTHER; note = 2'-Omethyluridine
  modified_base 65: mod_base = OTHER; note = 2'-Omethylguanosine
  modified_base 66: mod_base = OTHER; note = 2'-Omethyluridine
  modified_base 67: mod_base = OTHER; note = 2'-Omethylcytosine
  modified_base 68: mod_base = OTHER; note = 2'-Omethylcytosine
  modified_base 69: mod_base = OTHER; note = 2'-Omethyladenosine
  modified_base 71: mod_base = OTHER; note = 2'-Omethylguanosine
  modified_base 72: mod_base = OTHER; note = 2'-Omethylcytosine

SEQ ID NO: 9472 - RNA, 76 nt, synthetic construct; identical to SEQ ID NO: 625
  source 1..76: mol_type = other RNA
  modified_base 1: mod_base = OTHER; note = 2'-Omethylguanosine
  modified_base 10: mod_base = OTHER; note = 2'-Omethylguanosine
  modified_base 13: mod_base = OTHER; note = 2'-Omethylcytosine
  modified_base 17: mod_base = OTHER; note = Guanosine phosphorothiorate
  modified_base 18: mod_base = OTHER; note = 2'-Omethylguanosine
  modified_base 19: mod_base = OTHER; note = Adenosine phosphorothiorate
  modified_base 20: mod_base = OTHER; note = 2'-Omethyluridine
  modified_base 25: mod_base = OTHER; note = 2'-Omethylcytosine
  modified_base 29: mod_base = OTHER; note = 2'-Omethylguanosine
  modified_base 33: mod_base = OTHER; note = 2'-fluorouridine
  modified_base 35: mod_base = OTHER; note = Cytosine phosphorothiorate
  modified_base 37: mod_base = OTHER; note = Adenosine phosphorothiorate
  modified_base 38: mod_base = OTHER; note = Adenosine phosphorothiorate
  modified_base 43: mod_base = OTHER; note = 2'-Omethyladenosine
  modified_base 44: mod_base = OTHER; note = 2'-fluoroadenosine
  modified_base 46: mod_base = OTHER; note = Guanosine phosphorothiorate
  modified_base 50: mod_base = OTHER; note = 2'-Omethylcytosine
  modified_base 52: mod_base = OTHER; note = 2'-Omethylguanosine
  modified_base 55: mod_base = OTHER; note = Uridine phosphorothiorate
  modified_base 56: mod_base = OTHER; note = 2'-Omethylcytosine
  modified_base 57: mod_base = OTHER; note = Guanosine phosphorothiorate
  modified_base 62: mod_base = OTHER; note = 2'-Omethylcytosine
  modified_base 63: mod_base = OTHER; note = 2'-fluorocytosine
  modified_base 65: mod_base = OTHER; note = 2'-Omethylguanosine
  modified_base 71: mod_base = OTHER; note = 2'-Omethyluridine
  modified_base 73: mod_base = OTHER; note = 2'-Omethylguanosine

SEQ ID NO: 9473 - RNA, 76 nt, synthetic construct
  source 1..76: mol_type = other RNA
ggctccgtgacgcaatggatagcgtattggtcttcaaaatcaaaggttccgggttcgagtcccggcggagtcgcca

SEQ ID NO: 9474 - RNA, 86 nt, synthetic construct
  source 1..86: mol_type = other RNA
accaggatggccgagtggttaaggcgttggacttcagttccaatggacgtatgtcttcgtgggttcgaaccccactcctggtacca

SEQ ID NO: 9475 - RNA, 75 nt, synthetic construct; identical to SEQ ID NO: 3311
  source 1..75: mol_type = other RNA
  modified_base 1: mod_base = OTHER; note = 2'-fluoroguanosine phosphorothiorate
  modified_base 2: mod_base = OTHER; note = 2'-Omethylguanosine phosphorothiorate
  modified_base 12: mod_base = OTHER; note = Guanosine phosphorothiorate
  modified_base 22: mod_base = OTHER; note = Guanosine phosphorothiorate
  modified_base 24: mod_base = OTHER; note = 2'-fluoroadenosine
  modified_base 28: mod_base = OTHER; note = 2'-Omethyluridine
  modified_base 36: mod_base = OTHER; note = 2'-fluoroadenosine
  modified_base 59: mod_base = OTHER; note = 2'-Omethyluridine
  modified_base 60: mod_base = OTHER; note = 2'-fluorocytosine
  modified_base 65: mod_base = OTHER; note = 2'-fluorouridine
  modified_base 73: mod_base = OTHER; note = Cytosine phosphorothiorate
  modified_base 74: mod_base = OTHER; note = 2'-Omethylcytosine

SEQ ID NO: 9476 - RNA, 75 nt, synthetic construct; identical to SEQ ID NO: 3299
  source 1..75: mol_type = other RNA
  modified_base 10: mod_base = OTHER; note = Cytosine phosphorothiorate
  modified_base 15: mod_base = OTHER; note = 2'-Omethyluridine phosphorothiorate
  modified_base 21: mod_base = OTHER; note = Guanosine phosphorothiorate
  modified_base 22: mod_base = OTHER; note = 2'-Omethyladenosine phosphorothiorate
  modified_base 24: mod_base = OTHER; note = 2'-fluorocytosine
  modified_base 25: mod_base = OTHER; note = 2'-fluoroadenosine phosphorothiorate
  modified_base 28: mod_base = OTHER; note = 2'-fluoroadenosine
  modified_base 38: mod_base = OTHER; note = Uridine phosphorothiorate
  modified_base 39: mod_base = OTHER; note = Cytosine phosphorothiorate
  modified_base 40: mod_base = OTHER; note = 2'-fluorouridine
  modified_base 41: mod_base = OTHER; note = 2'-Omethylguanosine phosphorothiorate
  modified_base 48: mod_base = OTHER; note = 2'-fluorocytosine phosphorothiorate
  modified_base 49: mod_base = OTHER; note = 2'-Omethyladenosine phosphorothiorate
  modified_base 56: mod_base = OTHER; note = Adenosine phosphorothiorate
  modified_base 60: mod_base = OTHER; note = 2'-Omethylcytosine phosphorothiorate
  modified_base 62: mod_base = OTHER; note = 2'-fluorocytosine
  modified_base 69: mod_base = OTHER; note = Guanosine phosphorothiorate
  modified_base 73: mod_base = OTHER; note = Cytosine phosphorothiorate
  modified_base 74: mod_base = OTHER; note = Cytosine phosphorothiorate

SEQ ID NO: 9477 - RNA, 76 nt, synthetic construct
  source 1..76: mol_type = other RNA
gcctccgtggcgcaatggacagcgcattggacttcaaattcaaaggttccgggttcgagtcccggcggaggcgcca

SEQ ID NO: 9478 - RNA, 76 nt, synthetic construct; identical to SEQ ID NO: 3289
  source 1..76: mol_type = other RNA
  modified_base 1: mod_base = OTHER; note = 2'-Omethylguanosine phosphorothiorate
  modified_base 2: mod_base = OTHER; note = 2'-Omethylcytosine phosphorothiorate
  modified_base 3: mod_base = OTHER; note = 2'-Omethylcytosine
  modified_base 4: mod_base = OTHER; note = 2'-Omethyluridine
  modified_base 5: mod_base = OTHER; note = 2'-Omethylguanosine
  modified_base 6: mod_base = OTHER; note = 2'-Omethylguanosine
  modified_base 10: mod_base = OTHER; note = 2'-Omethylguanosine
  modified_base 11: mod_base = OTHER; note = 2'-Omethylcytosine
  modified_base 12: mod_base = OTHER; note = 2'-Omethyluridine
  modified_base 13: mod_base = OTHER; note = 2'-Omethylcytosine
  modified_base 16: mod_base = OTHER; note = 2'-Omethyluridine
  modified_base 18: mod_base = OTHER; note = 2'-Omethylguanosine
  modified_base 19: mod_base = OTHER; note = 2'-Omethylguanosine
  modified_base 33: mod_base = OTHER; note = 2'-fluorouridine
  modified_base 35: mod_base = OTHER; note = Uridine phosphorothiorate
  modified_base 37: mod_base = OTHER; note = Adenosine phosphorothiorate
  modified_base 38: mod_base = OTHER; note = Adenosine phosphorothiorate
  modified_base 44: mod_base = OTHER; note = 2'-Omethylguanosine
  modified_base 45: mod_base = OTHER; note = 2'-Omethylguanosine
  modified_base 46: mod_base = OTHER; note = 2'-fluoroguanosine
  modified_base 47: mod_base = OTHER; note = 2'-fluorouridine
  modified_base 48: mod_base = OTHER; note = 2'-fluorocytosine
  modified_base 56: mod_base = OTHER; note = 2'-Omethylcytosine
  modified_base 59: mod_base = OTHER; note = 2'-Omethylguanosine
  modified_base 61: mod_base = OTHER; note = 2'-Omethylcytosine
  modified_base 62: mod_base = OTHER; note = 2'-Omethylcytosine
  modified_base 63: mod_base = OTHER; note = 2'-fluorocytosine
  modified_base 64: mod_base = OTHER; note = 2'-Omethyluridine
  modified_base 65: mod_base = OTHER; note = 2'-Omethylguanosine
  modified_base 66: mod_base = OTHER; note = 2'-Omethyluridine
  modified_base 67: mod_base = OTHER; note = 2'-Omethylcytosine
  modified_base 68: mod_base = OTHER; note = 2'-Omethylcytosine
  modified_base 73: mod_base = OTHER; note = 2'-Omethylguanosine

SEQ ID NO: 9479 - RNA, 76 nt, synthetic construct; identical to SEQ ID NO: 3318
  source 1..76: mol_type = other RNA
  modified_base 1: mod_base = OTHER; note = 2'-Omethylcytosine
  modified_base 2: mod_base = OTHER; note = 2'-Omethylcytosine
  modified_base 3: mod_base = OTHER; note = 2'-Omethyluridine
  modified_base 4: mod_base = OTHER; note = 2'-Omethyluridine
  modified_base 5: mod_base = OTHER; note = 2'-Omethylcytosine
  modified_base 6: mod_base = OTHER; note = 2'-Omethylguanosine
  modified_base 10: mod_base = OTHER; note = 2'-Omethylguanosine
  modified_base 11: mod_base = OTHER; note = 2'-Omethylcytosine
  modified_base 12: mod_base = OTHER; note = 2'-Omethyluridine
  modified_base 13: mod_base = OTHER; note = 2'-Omethylcytosine
  modified_base 14: mod_base = OTHER; note = 2'-Omethyladenosine
  modified_base 15: mod_base = OTHER; note = 2'-fluoroguanosine
  modified_base 16: mod_base = OTHER; note = 2'-Omethyluridine
  modified_base 18: mod_base = OTHER; note = 2'-Omethylguanosine
  modified_base 19: mod_base = OTHER; note = 2'-Omethylguanosine
  modified_base 22: mod_base = OTHER; note = 2'-Omethylguanosine
  modified_base 23: mod_base = OTHER; note = 2'-Omethyladenosine
  modified_base 24: mod_base = OTHER; note = 2'-Omethylguanosine
  modified_base 25: mod_base = OTHER; note = 2'-Omethylcytosine
  modified_base 33: mod_base = OTHER; note = 2'-fluorouridine
  modified_base 35: mod_base = OTHER; note = Uridine phosphorothiorate
  modified_base 37: mod_base = OTHER; note = Guanosine phosphorothiorate
  modified_base 38: mod_base = OTHER; note = Adenosine phosphorothiorate
  modified_base 41: mod_base = OTHER; note = 2'-Omethylcytosine
  modified_base 42: mod_base = OTHER; note = 2'-Omethyluridine
  modified_base 43: mod_base = OTHER; note = 2'-Omethyluridine
  modified_base 44: mod_base = OTHER; note = 2'-Omethyladenosine
  modified_base 49: mod_base = OTHER; note = 2'-Omethylguanosine
  modified_base 50: mod_base = OTHER; note = 2'-Omethylcytosine
  modified_base 52: mod_base = OTHER; note = 2'-Omethylguanosine
  modified_base 54: mod_base = OTHER; note = 2'-Omethyluridine
  modified_base 55: mod_base = OTHER; note = Uridine phosphorothiorate
  modified_base 56: mod_base = OTHER; note = 2'-Omethylcytosine
  modified_base 57: mod_base = OTHER; note = 2'-fluoroguanosine
  modified_base 59: mod_base = OTHER; note = 2'-Omethyladenosine
  modified_base 61: mod_base = OTHER; note = 2'-Omethylcytosine
  modified_base 65: mod_base = OTHER; note = 2'-Omethylcytosine
  modified_base 73: mod_base = OTHER; note = 2'-Omethyladenosine

SEQ ID NO: 9480 - RNA, 85 nt, synthetic construct; identical to SEQ ID NO: 3286
  source 1..85: mol_type = other RNA
  modified_base 1: mod_base = OTHER; note = 2'-Omethylcytosine phosphorothiorate
  modified_base 30: mod_base = OTHER; note = 2'-fluoroadenosine
  modified_base 43: mod_base = OTHER; note = 2'-Omethyluridine
  modified_base 57: mod_base = OTHER; note = 2'-Omethylcytosine
  modified_base 66: mod_base = OTHER; note = Guanosine phosphorothiorate
  modified_base 72: mod_base = OTHER; note = Cytosine phosphorothiorate

SEQ ID NO: 9481 - RNA, 76 nt, synthetic construct; identical to SEQ ID NO: 625
  source 1..76: mol_type = other RNA
  modified_base 1: mod_base = OTHER; note = 2'-Omethylguanosine phosphorothiorate
  modified_base 2: mod_base = OTHER; note = 2'-Omethylguanosine phosphorothiorate
  modified_base 19: mod_base = OTHER; note = Adenosine phosphorothiorate
  modified_base 33: mod_base = OTHER; note = 2'-O-(2-Methoxyethyl) thymine
  modified_base 39: mod_base = OTHER; note = 2'-fluorouridine
  modified_base 49: mod_base = OTHER; note = 2'-fluorocytosine
  modified_base 52: mod_base = OTHER; note = Guanosine phosphorothiorate
  modified_base 74: mod_base = OTHER; note = Cytosine phosphorothiorate
  modified_base 75: mod_base = OTHER; note = 2'-Omethylcytosine phosphorothiorate
  modified_base 76: mod_base = OTHER; note = 2'-Omethyladenosine

SEQ ID NO: 9482 - RNA, 76 nt, synthetic construct; identical to SEQ ID NO: 625
  source 1..76: mol_type = other RNA
  modified_base 39: mod_base = OTHER; note = 2'-fluorouridine
  modified_base 40: mod_base = OTHER; note = 2'-fluorouridine
  modified_base 41: mod_base = OTHER; note = 2'-fluorocytosine
  modified_base 42: mod_base = OTHER; note = 2'-fluoroadenosine
  modified_base 43: mod_base = OTHER; note = 2'-fluoroadenosine

SEQ ID NO: 9483 - RNA, 75 nt, synthetic construct; identical to SEQ ID NO: 1045
  source 1..75: mol_type = other RNA
  modified_base 2: mod_base = OTHER; note = Guanosine phosphorothiorate
  modified_base 3: mod_base = OTHER; note = 2'-fluorouridine phosphorothiorate
  modified_base 10: mod_base = OTHER; note = Guanosine phosphorothiorate
  modified_base 12: mod_base = OTHER; note = 2'-fluoroguanosine
  modified_base 22: mod_base = OTHER; note = 2'-fluoroguanosine
  modified_base 23: mod_base = OTHER; note = 2'-fluorocytosine
  modified_base 24: mod_base = OTHER; note = 2'-fluoroadenosine
  modified_base 27: mod_base = OTHER; note = 2'-fluorocytosine
  modified_base 38: mod_base = OTHER; note = Adenosine phosphorothiorate
  modified_base 41: mod_base = OTHER; note = 2'-fluorocytosine
  modified_base 56: mod_base = OTHER; note = 2'-fluoroguanosine
  modified_base 62: mod_base = OTHER; note = 2'-fluorocytosine
  modified_base 66: mod_base = OTHER; note = Guanosine phosphorothiorate
  modified_base 67: mod_base = OTHER; note = 2'-fluoroguanosine
  modified_base 68: mod_base = OTHER; note = Adenosine phosphorothiorate
  modified_base 73: mod_base = OTHER; note = Cytosine phosphorothiorate
  modified_base 74: mod_base = OTHER; note = 2'-fluorocytosine phosphorothiorate

SEQ ID NO: 9484 - DNA, 73 bp, synthetic construct; identical to SEQ ID NO: 3380
  source 1..73: mol_type = other DNA
  modified_base 1: mod_base = OTHER; note = 2'-Omethylguanosine phosphorothiorate
  modified_base 2: mod_base = OTHER; note = 2'-Omethylguanosine phosphorothiorate
  modified_base 52: mod_base = OTHER; note = 2'-Omethylguanosine
  modified_base 63: mod_base = OTHER; note = Cytosine phosphorothiorate
  modified_base 72: mod_base = OTHER; note = 2'-Omethylcytosine
  misc_feature 1..63: note = RNA
  misc_feature 64: note = DNA
  misc_feature 65..73: note = RNA

SEQ ID NO: 9485 - RNA, 76 nt, synthetic construct; identical to SEQ ID NO: 625
  source 1..76: mol_type = other RNA
  modified_base 3: mod_base = OTHER; note = 2'-Omethylcytosine
  modified_base 4: mod_base = OTHER; note = 2'-Omethyluridine
  modified_base 5: mod_base = OTHER; note = 2'-fluorocytosine
  modified_base 12: mod_base = OTHER; note = 2'-Omethylguanosine phosphorothiorate
  modified_base 13: mod_base = OTHER; note = 2'-fluorocytosine
  modified_base 15: mod_base = OTHER; note = 2'-Omethyladenosine
  modified_base 17: mod_base = OTHER; note = 2'-Omethylguanosine
  modified_base 19: mod_base = OTHER; note = Adenosine phosphorothiorate
  modified_base 22: mod_base = OTHER; note = 2'-fluoroguanosine phosphorothiorate
  modified_base 24: mod_base = OTHER; note = Guanosine phosphorothiorate
  modified_base 25: mod_base = OTHER; note = 2'-fluorocytosine
  modified_base 26: mod_base = OTHER; note = Adenosine phosphorothiorate
  modified_base 27: mod_base = OTHER; note = 2'-Omethyluridine
  modified_base 28: mod_base = OTHER; note = 2'-fluorouridine
  modified_base 29: mod_base = OTHER; note = 2'-fluoroguanosine
  modified_base 32: mod_base = OTHER; note = 2'-fluorocytosine
  modified_base 37: mod_base = OTHER; note = Adenosine phosphorothiorate
  modified_base 38: mod_base = OTHER; note = 2'-Omethyladenosine
  modified_base 39: mod_base = OTHER; note = 2'-fluorouridine
  modified_base 40: mod_base = OTHER; note = 2'-fluorouridine
  modified_base 41: mod_base = OTHER; note = Cytosine phosphorothiorate
  modified_base 42: mod_base = OTHER; note = 2'-fluoroadenosine
  modified_base 45: mod_base = OTHER; note = 2'-fluoroguanosine
  modified_base 47: mod_base = OTHER; note = 2'-Omethyluridine
  modified_base 48: mod_base = OTHER; note = 2'-fluorouridine phosphorothiorate
  modified_base 49: mod_base = OTHER; note = 2'-Omethylcytosine
  modified_base 54: mod_base = OTHER; note = 2'-fluorouridine
  modified_base 58: mod_base = OTHER; note = Adenosine phosphorothiorate
  modified_base 62: mod_base = OTHER; note = 2'-Omethylcytosine
  modified_base 63: mod_base = OTHER; note = 2'-Omethylcytosine phosphorothiorate
  modified_base 64: mod_base = OTHER; note = 2'-Omethylguanosine phosphorothiorate
  modified_base 65: mod_base = OTHER; note = 2'-fluoroguanosine
  modified_base 68: mod_base = OTHER; note = 2'-Omethylguanosine phosphorothiorate
  modified_base 69: mod_base = OTHER; note = Adenosine phosphorothiorate
  modified_base 70: mod_base = OTHER; note = 2'-fluoroguanosine
  modified_base 73: mod_base = OTHER; note = 2'-Omethylguanosine
  modified_base 74: mod_base = OTHER; note = 2'-Omethylcytosine
  modified_base 75: mod_base = OTHER; note = Cytosine phosphorothiorate
  modified_base 76: mod_base = OTHER; note = 2'-fluoroadenosine

SEQ ID NO: 9486 - RNA, 75 nt, synthetic construct; identical to SEQ ID NO: 3336
  source 1..75: mol_type = other RNA
  modified_base 4: mod_base = OTHER; note = 2'-Omethylguanosine
  modified_base 13: mod_base = OTHER; note = 2'-fluoroadenosine
  modified_base 14: mod_base = OTHER; note = 2'-fluoroguanosine
  modified_base 18: mod_base = OTHER; note = 2'-Omethylguanosine phosphorothiorate
  modified_base 21: mod_base = OTHER; note = 2'-fluoroguanosine phosphorothiorate
  modified_base 26: mod_base = OTHER; note = Uridine phosphorothiorate
  modified_base 28: mod_base = OTHER; note = 2'-fluoroadenosine
  modified_base 31: mod_base = OTHER; note = 2'-fluorocytosine phosphorothiorate
  modified_base 39: mod_base = OTHER; note = 2'-Omethylcytosine
  modified_base 41: mod_base = OTHER; note = 2'-Omethylguanosine phosphorothiorate
  modified_base 46: mod_base = OTHER; note = 2'-fluorouridine
  modified_base 47: mod_base = OTHER; note = 2'-fluorocytosine
  modified_base 54: mod_base = OTHER; note = 2'-fluorouridine
  modified_base 58: mod_base = OTHER; note = Guanosine phosphorothiorate
  modified_base 60: mod_base = OTHER; note = 2'-fluorocytosine phosphorothiorate
  modified_base 64: mod_base = OTHER; note = 2'-fluoroguanosine
  modified_base 72: mod_base = OTHER; note = 2'-Omethylguanosine
  modified_base 73: mod_base = OTHER; note = Cytosine phosphorothiorate
  modified_base 74: mod_base = OTHER; note = Cytosine phosphorothiorate

SEQ ID NO: 9487 - RNA, 85 nt, synthetic construct; identical to SEQ ID NO: 3288
  source 1..85: mol_type = other RNA
  modified_base 1: mod_base = OTHER; note = 2'-Omethylcytosine
  modified_base 2: mod_base = OTHER; note = 2'-Omethylcytosine
  modified_base 3: mod_base = OTHER; note = 2'-fluoroadenosine phosphorothiorate
  modified_base 10: mod_base = OTHER; note = Cytosine phosphorothiorate
  modified_base 17: mod_base = OTHER; note = 2'-Omethylguanosine
  modified_base 27: mod_base = OTHER; note = 2'-fluorouridine
  modified_base 29: mod_base = OTHER; note = 2'-fluoroguanosine
  modified_base 32: mod_base = OTHER; note = 2'-fluorouridine
  modified_base 36: mod_base = OTHER; note = 2'-Omethylguanosine
  modified_base 42: mod_base = OTHER; note = Adenosine phosphorothiorate
  modified_base 44: mod_base = OTHER; note = Guanosine phosphorothiorate
  modified_base 47: mod_base = OTHER; note = Cytosine phosphorothiorate
  modified_base 50: mod_base = OTHER; note = 2'-Omethyladenosine
  modified_base 54: mod_base = OTHER; note = Cytosine phosphorothiorate
  modified_base 59: mod_base = OTHER; note = 2'-Omethyluridine
  modified_base 61: mod_base = OTHER; note = 2'-Omethylguanosine
  modified_base 65: mod_base = OTHER; note = Cytosine phosphorothiorate

SEQ ID NO: 9488 - RNA, 76 nt, synthetic construct; identical to SEQ ID NO: 3332
  source 1..76: mol_type = other RNA

SEQ ID NO: 9489 - RNA, 73 nt, synthetic construct; identical to SEQ ID NO: 935
  source 1..73: mol_type = other RNA
  modified_base 1: mod_base = OTHER; note = 2'-Omethylguanosine
  modified_base 14: mod_base = OTHER; note = 2'-Omethyladenosine
  modified_base 15: mod_base = OTHER; note = 2'-fluoroadenosine
  modified_base 16: mod_base = OTHER; note = 2'-Omethyluridine
  modified_base 17: mod_base = OTHER; note = 2'-Omethylguanosine
  modified_base 18: mod_base = OTHER; note = 2'-Omethylguanosine
  modified_base 20: mod_base = OTHER; note = 2'-Omethyluridine
  modified_base 73: mod_base = OTHER; note = 2'-Omethylguanosine

SEQ ID NO: 9490 - RNA, 85 nt, synthetic construct; identical to SEQ ID NO: 3286
  source 1..85: mol_type = other RNA
  modified_base 1: mod_base = OTHER; note = 2'-Omethylcytosine
  modified_base 11: mod_base = OTHER; note = Cytosine phosphorothiorate
  modified_base 15: mod_base = OTHER; note = Uridine phosphorothiorate
  modified_base 25: mod_base = OTHER; note = 2'-fluoroguanosine
  modified_base 26: mod_base = OTHER; note = 2'-Omethyluridine phosphorothiorate
  modified_base 27: mod_base = OTHER; note = 2'-fluorouridine
  modified_base 30: mod_base = OTHER; note = 2'-fluoroadenosine
  modified_base 34: mod_base = OTHER; note = 2'-fluorouridine
  modified_base 39: mod_base = OTHER; note = Cytosine phosphorothiorate
  modified_base 42: mod_base = OTHER; note = Adenosine phosphorothiorate
  modified_base 46: mod_base = OTHER; note = Adenosine phosphorothiorate
  modified_base 51: mod_base = OTHER; note = 2'-Omethyluridine
  modified_base 55: mod_base = OTHER; note = 2'-Omethylcytosine
  modified_base 57: mod_base = OTHER; note = 2'-Omethylcytosine
  modified_base 59: mod_base = OTHER; note = 2'-fluorouridine
  modified_base 61: mod_base = OTHER; note = 2'-fluoroguanosine phosphorothiorate
  modified_base 69: mod_base = OTHER; note = Cytosine phosphorothiorate
  modified_base 75: mod_base = OTHER; note = 2'-fluorouridine
  modified_base 81: mod_base = OTHER; note = 2'-Omethyluridine
  modified_base 84: mod_base = OTHER; note = 2'-fluorocytosine phosphorothiorate

SEQ ID NO: 9491 - RNA, 76 nt, synthetic construct; identical to SEQ ID NO: 625
  source 1..76: mol_type = other RNA
  modified_base 1: mod_base = OTHER; note = 2'-Omethylguanosine phosphorothiorate
  modified_base 2: mod_base = OTHER; note = 2'-Omethylguanosine phosphorothiorate
  modified_base 3: mod_base = OTHER; note = 2'-Omethylcytosine phosphorothiorate
  modified_base 4: mod_base = OTHER; note = 2'-Omethyluridine phosphorothiorate
  modified_base 5: mod_base = OTHER; note = 2'-Omethylcytosine phosphorothiorate
  modified_base 6: mod_base = OTHER; note = 2'-Omethylcytosine phosphorothiorate
  modified_base 10: mod_base = OTHER; note = 2'-Omethylguanosine
  modified_base 11: mod_base = OTHER; note = 2'-Omethylcytosine
  modified_base 12: mod_base = OTHER; note = 2'-Omethylguanosine
  modified_base 13: mod_base = OTHER; note = 2'-Omethylcytosine
  modified_base 22: mod_base = OTHER; note = 2'-Omethylguanosine
  modified_base 23: mod_base = OTHER; note = 2'-Omethylcytosine
  modified_base 24: mod_base = OTHER; note = 2'-Omethylguanosine
  modified_base 25: mod_base = OTHER; note = 2'-Omethylcytosine
  modified_base 40: mod_base = OTHER; note = 2'-fluorouridine
  modified_base 41: mod_base = OTHER; note = 2'-fluorocytosine
  modified_base 42: mod_base = OTHER; note = 2'-fluoroadenosine
  modified_base 43: mod_base = OTHER; note = 2'-fluoroadenosine
  modified_base 44: mod_base = OTHER; note = 2'-Omethyladenosine
  modified_base 45: mod_base = OTHER; note = 2'-Omethylguanosine
  modified_base 46: mod_base = OTHER; note = 2'-Omethylguanosine
  modified_base 49: mod_base = OTHER; note = 2'-Omethylcytosine
  modified_base 50: mod_base = OTHER; note = 2'-Omethylcytosine
  modified_base 51: mod_base = OTHER; note = 2'-Omethylguanosine
  modified_base 52: mod_base = OTHER; note = 2'-Omethylguanosine
  modified_base 53: mod_base = OTHER; note = 2'-Omethylguanosine
  modified_base 61: mod_base = OTHER; note = 2'-Omethylcytosine
  modified_base 62: mod_base = OTHER; note = 2'-Omethylcytosine
  modified_base 63: mod_base = OTHER; note = 2'-Omethylcytosine
  modified_base 64: mod_base = OTHER; note = 2'-Omethylguanosine
  modified_base 65: mod_base = OTHER; note = 2'-Omethylguanosine
  modified_base 66: mod_base = OTHER; note = 2'-Omethylcytosine
  modified_base 67: mod_base = OTHER; note = 2'-Omethylguanosine
  modified_base 68: mod_base = OTHER; note = 2'-Omethylguanosine
  modified_base 69: mod_base = OTHER; note = 2'-Omethyladenosine

SEQ ID NO: 9492 - RNA, 75 nt, synthetic construct; identical to SEQ ID NO: 1045
  source 1..75: mol_type = other RNA
  modified_base 2: mod_base = OTHER; note = 2'-Omethylguanosine phosphorothiorate
  modified_base 3: mod_base = OTHER; note = Uridine phosphorothiorate
  modified_base 7: mod_base = OTHER; note = Adenosine phosphorothiorate
  modified_base 15: mod_base = OTHER; note = 2'-fluoroadenosine phosphorothiorate
  modified_base 16: mod_base = OTHER; note = 2'-Omethyluridine
  modified_base 17: mod_base = OTHER; note = 2'-Omethylguanosine phosphorothiorate
  modified_base 18: mod_base = OTHER; note = 2'-Omethylguanosine phosphorothiorate
  modified_base 29: mod_base = OTHER; note = 2'-fluoroguanosine phosphorothiorate
  modified_base 39: mod_base = OTHER; note = 2'-Omethyluridine
  modified_base 42: mod_base = OTHER; note = 2'-Omethyladenosine
  modified_base 65: mod_base = OTHER; note = 2'-Omethyluridine
  modified_base 66: mod_base = OTHER; note = 2'-Omethylguanosine
  modified_base 67: mod_base = OTHER; note = 2'-Omethylguanosine
  modified_base 69: mod_base = OTHER; note = 2'-Omethyladenosine
  modified_base 72: mod_base = OTHER; note = 2'-Omethyluridine
  modified_base 74: mod_base = OTHER; note = 2'-Omethylcytosine phosphorothiorate

SEQ ID NO: 9493 - RNA, 75 nt, synthetic construct; identical to SEQ ID NO: 3336
  source 1..75: mol_type = other RNA
  modified_base 21: mod_base = OTHER; note = 2'-fluoroguanosine
  modified_base 22: mod_base = OTHER; note = 2'-fluoroadenosine
  modified_base 30: mod_base = OTHER; note = 2'-fluoroadenosine
  modified_base 40: mod_base = OTHER; note = 2'-Omethyluridine phosphorothiorate
  modified_base 44: mod_base = OTHER; note = 2'-fluoroguanosine
  modified_base 72: mod_base = OTHER; note = Guanosine phosphorothiorate
  modified_base 74: mod_base = OTHER; note = Cytosine phosphorothiorate

SEQ ID NO: 9494 - RNA, 85 nt, synthetic construct; identical to SEQ ID NO: 3297
  source 1..85: mol_type = other RNA
  modified_base 1: mod_base = OTHER; note = 2'-Omethylguanosine phosphorothiorate
  modified_base 3: mod_base = OTHER; note = Uridine phosphorothiorate
  modified_base 39: mod_base = OTHER; note = 2'-Omethyluridine
  modified_base 47: mod_base = OTHER; note = 2'-fluoroguanosine
  modified_base 55: mod_base = OTHER; note = 2'-Omethylcytosine phosphorothiorate
  modified_base 64: mod_base = OTHER; note = 2'-fluorouridine
  modified_base 82: mod_base = OTHER; note = Guanosine phosphorothiorate

SEQ ID NO: 9495 - RNA, 75 nt, synthetic construct; identical to SEQ ID NO: 1045
  source 1..75: mol_type = other RNA
  modified_base 1: mod_base = OTHER; note = 2'-Omethylguanosine phosphorothiorate
  modified_base 2: mod_base = OTHER; note = 2'-Omethylguanosine phosphorothiorate
  modified_base 3: mod_base = OTHER; note = 2'-Omethyluridine phosphorothiorate
  modified_base 5: mod_base = OTHER; note = 2'-Omethylcytosine phosphorothiorate
  modified_base 14: mod_base = OTHER; note = 2'-Omethyladenosine
  modified_base 16: mod_base = OTHER; note = 2'-Omethyluridine
  modified_base 18: mod_base = OTHER; note = 2'-fluoroguanosine phosphorothiorate
  modified_base 33: mod_base = OTHER; note = 2'-Omethyluridine
  modified_base 35: mod_base = OTHER; note = 2'-Omethyluridine
  modified_base 45: mod_base = OTHER; note = 2'-Omethylguanosine
  modified_base 52: mod_base = OTHER; note = 2'-Omethylguanosine phosphorothiorate
  modified_base 53: mod_base = OTHER; note = 2'-Omethyluridine phosphorothiorate
  modified_base 55: mod_base = OTHER; note = 2'-Omethylcytosine
  modified_base 61: mod_base = OTHER; note = 2'-Omethyluridine
  modified_base 69: mod_base = OTHER; note = 2'-Omethyladenosine
  modified_base 72: mod_base = OTHER; note = 2'-Omethyluridine
  modified_base 73: mod_base = OTHER; note = Cytosine phosphorothiorate
  modified_base 74: mod_base = OTHER; note = 2'-Omethylcytosine phosphorothiorate
  modified_base 75: mod_base = OTHER; note = 2'-Omethyladenosine

SEQ ID NO: 9496 - RNA, 74 nt, synthetic construct; identical to SEQ ID NO: 3293
  source 1..74: mol_type = other RNA
  modified_base 1: mod_base = OTHER; note = Adenosine phosphorothiorate
  modified_base 2: mod_base = OTHER; note = Cytosine phosphorothiorate
  modified_base 4: mod_base = OTHER; note = Uridine phosphorothiorate
  modified_base 6: mod_base = OTHER; note = 2'-fluoroguanosine
  modified_base 9: mod_base = OTHER; note = 2'-fluoroguanosine
  modified_base 10: mod_base = OTHER; note = 2'-Omethylcytosine phosphorothiorate
  modified_base 24: mod_base = OTHER; note = 2'-fluoroguanosine
  modified_base 25: mod_base = OTHER; note = 2'-fluorouridine phosphorothiorate
  modified_base 27: mod_base = OTHER; note = 2'-fluorouridine
  modified_base 41: mod_base = OTHER; note = 2'-fluoroadenosine
  modified_base 43: mod_base = OTHER; note = 2'-fluoroguanosine
  modified_base 44: mod_base = OTHER; note = Guanosine phosphorothiorate
  modified_base 48: mod_base = OTHER; note = Cytosine phosphorothiorate
  modified_base 52: mod_base = OTHER; note = 2'-fluorouridine
  modified_base 62: mod_base = OTHER; note = 2'-fluoroguanosine
  modified_base 73: mod_base = OTHER; note = 2'-Omethylcytosine phosphorothiorate
  modified_base 74: mod_base = OTHER; note = 2'-Omethyladenosine

SEQ ID NO: 9497 - RNA, 76 nt, synthetic construct; identical to SEQ ID NO: 3289
  source 1..76: mol_type = other RNA
  modified_base 1: mod_base = OTHER; note = 2'-Omethylguanosine phosphorothiorate
  modified_base 2: mod_base = OTHER; note = 2'-Omethylcytosine phosphorothiorate
  modified_base 14: mod_base = OTHER; note = 2'-Omethyladenosine
  modified_base 18: mod_base = OTHER; note = 2'-Omethylguanosine
  modified_base 19: mod_base = OTHER; note = 2'-Omethylguanosine
  modified_base 22: mod_base = OTHER; note = 2'-Omethylguanosine
  modified_base 25: mod_base = OTHER; note = 2'-Omethylcytosine
  modified_base 27: mod_base = OTHER; note = 2'-Omethyluridine
  modified_base 33: mod_base = OTHER; note = 2'-fluorouridine
  modified_base 41: mod_base = OTHER; note = 2'-Omethyluridine
  modified_base 44: mod_base = OTHER; note = 2'-Omethylguanosine
  modified_base 45: mod_base = OTHER; note = 2'-Omethylguanosine
  modified_base 46: mod_base = OTHER; note = 2'-fluoroguanosine
  modified_base 47: mod_base = OTHER; note = 2'-fluorouridine
  modified_base 48: mod_base = OTHER; note = 2'-fluorocytosine
  modified_base 52: mod_base = OTHER; note = 2'-Omethylguanosine
  modified_base 55: mod_base = OTHER; note = Uridine phosphorothiorate
  modified_base 71: mod_base = OTHER; note = 2'-Omethylguanosine
  modified_base 73: mod_base = OTHER; note = 2'-Omethylguanosine

SEQ ID NO: 9498 - RNA, 85 nt, synthetic construct; identical to SEQ ID NO: 3288
  source 1..85: mol_type = other RNA
  modified_base 1: mod_base = OTHER; note = 2'-Omethylcytosine
  modified_base 30: mod_base = OTHER; note = 2'-fluoroadenosine
  modified_base 34: mod_base = OTHER; note = 2'-fluorocytosine
  modified_base 36: mod_base = OTHER; note = Guanosine phosphorothiorate
  modified_base 42: mod_base = OTHER; note = Adenosine phosphorothiorate
  modified_base 84: mod_base = OTHER; note = Cytosine phosphorothiorate
  modified_base 85: mod_base = OTHER; note = 2'-fluoroadenosine

SEQ ID NO: 9499 - RNA, 76 nt, synthetic construct; identical to SEQ ID NO: 625
  source 1..76: mol_type = other RNA
  modified_base 14: mod_base = OTHER; note = 2'-Omethyladenosine
  modified_base 15: mod_base = OTHER; note = 2'-fluoroadenosine
  modified_base 16: mod_base = OTHER; note = 2'-Omethyluridine
  modified_base 17: mod_base = OTHER; note = 2'-Omethylguanosine
  modified_base 18: mod_base = OTHER; note = 2'-Omethylguanosine
  modified_base 19: mod_base = OTHER; note = 2'-fluoroadenosine
  modified_base 20: mod_base = OTHER; note = 2'-Omethyluridine
  modified_base 21: mod_base = OTHER; note = 2'-fluoroadenosine

SEQ ID NO: 9500 - RNA, 85 nt, synthetic construct; identical to SEQ ID NO: 3286
  source 1..85: mol_type = other RNA
  modified_base 1: mod_base = OTHER; note = 2'-Omethylcytosine phosphorothiorate
  modified_base 4: mod_base = OTHER; note = 2'-fluoroguanosine phosphorothiorate
  modified_base 13: mod_base = OTHER; note = Adenosine phosphorothiorate
  modified_base 17: mod_base = OTHER; note = Guanosine phosphorothiorate
  modified_base 28: mod_base = OTHER; note = 2'-fluoroguanosine
  modified_base 30: mod_base = OTHER; note = 2'-fluoroadenosine
  modified_base 33: mod_base = OTHER; note = 2'-fluorouridine
  modified_base 35: mod_base = OTHER; note = 2'-fluoroadenosine phosphorothiorate
  modified_base 43: mod_base = OTHER; note = 2'-Omethyluridine
  modified_base 46: mod_base = OTHER; note = Adenosine phosphorothiorate
  modified_base 47: mod_base = OTHER; note = Cytosine phosphorothiorate
  modified_base 50: mod_base = OTHER; note = 2'-Omethyladenosine
  modified_base 54: mod_base = OTHER; note = Cytosine phosphorothiorate
  modified_base 69: mod_base = OTHER; note = Cytosine phosphorothiorate
  modified_base 81: mod_base = OTHER; note = 2'-fluorouridine
  modified_base 84: mod_base = OTHER; note = 2'-Omethylcytosine

SEQ ID NO: 9501 - RNA, 75 nt, synthetic construct; identical to SEQ ID NO: 3336
  source 1..75: mol_type = other RNA
  modified_base 1: mod_base = OTHER; note = Cytosine phosphorothiorate
  modified_base 13: mod_base = OTHER; note = 2'-fluoroadenosine
  modified_base 15: mod_base = OTHER; note = 2'-Omethyluridine phosphorothiorate
  modified_base 21: mod_base = OTHER; note = Guanosine phosphorothiorate
  modified_base 22: mod_base = OTHER; note = 2'-fluoroadenosine
  modified_base 27: mod_base = OTHER; note = 2'-fluorocytosine phosphorothiorate
  modified_base 28: mod_base = OTHER; note = 2'-fluoroadenosine
  modified_base 29: mod_base = OTHER; note = 2'-fluoroguanosine
  modified_base 34: mod_base = OTHER; note = 2'-Omethyluridine phosphorothiorate
  modified_base 37: mod_base = OTHER; note = 2'-Omethyladenosine
  modified_base 39: mod_base = OTHER; note = 2'-Omethylcytosine phosphorothiorate
  modified_base 49: mod_base = OTHER; note = Adenosine phosphorothiorate
  modified_base 50: mod_base = OTHER; note = Guanosine phosphorothiorate
  modified_base 58: mod_base = OTHER; note = 2'-Omethylguanosine
  modified_base 73: mod_base = OTHER; note = 2'-Omethylcytosine
  modified_base 74: mod_base = OTHER; note = Cytosine phosphorothiorate

SEQ ID NO: 9502 - RNA, 76 nt, synthetic construct; identical to SEQ ID NO: 625
  source 1..76: mol_type = other RNA
  modified_base 1: mod_base = OTHER; note = 2'-Omethylguanosine phosphorothiorate
  modified_base 2: mod_base = OTHER; note = 2'-Omethylguanosine
  modified_base 17: mod_base = OTHER; note = 2'-Omethylguanosine
  modified_base 33: mod_base = OTHER; note = 2'-fluorouridine
  modified_base 35: mod_base = OTHER; note = Cytosine phosphorothiorate
  modified_base 37: mod_base = OTHER; note = Adenosine phosphorothiorate
  modified_base 38: mod_base = OTHER; note = Adenosine phosphorothiorate
  modified_base 52: mod_base = OTHER; note = 2'-fluoroguanosine
  modified_base 56: mod_base = OTHER; note = 2'-Omethylcytosine
  modified_base 62: mod_base = OTHER; note = 2'-Omethylcytosine
  modified_base 73: mod_base = OTHER; note = 2'-Omethylguanosine
  modified_base 75: mod_base = OTHER; note = 2'-fluorocytosine phosphorothiorate

SEQ ID NO: 9503 - RNA, 86 nt, synthetic construct; identical to SEQ ID NO: 3290
  source 1..86: mol_type = other RNA
  modified_base 1: mod_base = OTHER; note = 2'-Omethyladenosine
  modified_base 2: mod_base = OTHER; note = 2'-Omethylcytosine
  modified_base 3: mod_base = OTHER; note = 2'-Omethylcytosine
  modified_base 4: mod_base = OTHER; note = 2'-Omethyladenosine
  modified_base 5: mod_base = OTHER; note = 2'-Omethylguanosine
  modified_base 6: mod_base = OTHER; note = 2'-Omethylguanosine
  modified_base 10: mod_base = OTHER; note = 2'-Omethylguanosine
  modified_base 11: mod_base = OTHER; note = 2'-Omethylcytosine
  modified_base 12: mod_base = OTHER; note = 2'-Omethylcytosine
  modified_base 13: mod_base = OTHER; note = 2'-Omethylguanosine
  modified_base 14: mod_base = OTHER; note = 2'-Omethyladenosine
  modified_base 15: mod_base = OTHER; note = 2'-fluoroguanosine
  modified_base 16: mod_base = OTHER; note = 2'-Omethyluridine
  modified_base 17: mod_base = OTHER; note = 2'-Omethylguanosine
  modified_base 18: mod_base = OTHER; note = 2'-Omethylguanosine
  modified_base 19: mod_base = OTHER; note = 2'-fluorouridine
  modified_base 20: mod_base = OTHER; note = 2'-Omethyluridine
  modified_base 25: mod_base = OTHER; note = 2'-Omethylcytosine
  modified_base 33: mod_base = OTHER; note = 2'-fluorouridine
  modified_base 35: mod_base = OTHER; note = Cytosine phosphorothiorate
  modified_base 37: mod_base = OTHER; note = Guanosine phosphorothiorate
  modified_base 38: mod_base = OTHER; note = Adenosine phosphorothiorate
  modified_base 41: mod_base = OTHER; note = 2'-Omethylcytosine
  modified_base 42: mod_base = OTHER; note = 2'-Omethyladenosine
  modified_base 43: mod_base = OTHER; note = 2'-Omethyladenosine
  modified_base 44: mod_base = OTHER; note = 2'-Omethyluridine
  modified_base 59: mod_base = OTHER; note = 2'-Omethylguanosine
  modified_base 60: mod_base = OTHER; note = 2'-Omethyluridine
  modified_base 62: mod_base = OTHER; note = 2'-Omethylguanosine
  modified_base 64: mod_base = OTHER; note = 2'-Omethyluridine
  modified_base 65: mod_base = OTHER; note = Uridine phosphorothiorate
  modified_base 66: mod_base = OTHER; note = 2'-Omethylcytosine
  modified_base 67: mod_base = OTHER; note = 2'-fluoroguanosine
  modified_base 69: mod_base = OTHER; note = 2'-Omethyladenosine
  modified_base 71: mod_base = OTHER; note = 2'-Omethylcytosine
  modified_base 75: mod_base = OTHER; note = 2'-Omethylcytosine
  modified_base 83: mod_base = OTHER; note = 2'-Omethyladenosine

SEQ ID NO: 9504 - RNA, 76 nt, synthetic construct; identical to SEQ ID NO: 625
  source 1..76: mol_type = other RNA
  modified_base 62: mod_base = OTHER; note = 2'-O-(2-Methoxyethyl) 5-methylcytosine

SEQ ID NO: 9505 - RNA, 76 nt, synthetic construct; identical to SEQ ID NO: 3295
  source 1..76: mol_type = other RNA
  modified_base 1: mod_base = OTHER; note = 2'-fluorocytosine phosphorothiorate
  modified_base 2: mod_base = OTHER; note = 2'-Omethylcytosine
  modified_base 10: mod_base = OTHER; note = 2'-fluoroguanosine
  modified_base 11: mod_base = OTHER; note = 2'-fluorocytosine phosphorothiorate
  modified_base 24: mod_base = OTHER; note = 2'-Omethylguanosine
  modified_base 45: mod_base = OTHER; note = 2'-Omethylguanosine phosphorothiorate
  modified_base 53: mod_base = OTHER; note = 2'-Omethylguanosine
  modified_base 68: mod_base = OTHER; note = 2'-fluoroguanosine
  modified_base 75: mod_base = OTHER; note = 2'-Omethylcytosine phosphorothiorate

SEQ ID NO: 9506 - RNA, 76 nt, synthetic construct; identical to SEQ ID NO: 625
  source 1..76: mol_type = other RNA
  modified_base 1: mod_base = OTHER; note = 2'-Omethylguanosine
  modified_base 4: mod_base = OTHER; note = Uridine phosphorothiorate
  modified_base 5: mod_base = OTHER; note = 2'-Omethylcytosine
  modified_base 11: mod_base = OTHER; note = 2'-fluorocytosine
  modified_base 13: mod_base = OTHER; note = 2'-fluorocytosine
  modified_base 14: mod_base = OTHER; note = Adenosine phosphorothiorate
  modified_base 15: mod_base = OTHER; note = 2'-fluoroadenosine
  modified_base 16: mod_base = OTHER; note = 2'-fluorouridine
  modified_base 19: mod_base = OTHER; note = Adenosine phosphorothiorate
  modified_base 20: mod_base = OTHER; note = 2'-fluorouridine
  modified_base 24: mod_base = OTHER; note = Guanosine phosphorothiorate
  modified_base 26: mod_base = OTHER; note = 2'-Omethyladenosine
  modified_base 32: mod_base = OTHER; note = 2'-fluorocytosine
  modified_base 38: mod_base = OTHER; note = 2'-Omethyladenosine phosphorothiorate
  modified_base 39: mod_base = OTHER; note = 2'-fluorouridine
  modified_base 41: mod_base = OTHER; note = Cytosine phosphorothiorate
  modified_base 43: mod_base = OTHER; note = 2'-fluoroadenosine
  modified_base 45: mod_base = OTHER; note = 2'-fluoroguanosine
  modified_base 47: mod_base = OTHER; note = 2'-fluorouridine
  modified_base 48: mod_base = OTHER; note = 2'-Omethyluridine
  modified_base 53: mod_base = OTHER; note = 2'-fluoroguanosine
  modified_base 55: mod_base = OTHER; note = Uridine phosphorothiorate
  modified_base 60: mod_base = OTHER; note = 2'-Omethyluridine
  modified_base 62: mod_base = OTHER; note = 2'-Omethylcytosine
  modified_base 63: mod_base = OTHER; note = 2'-fluorocytosine
  modified_base 64: mod_base = OTHER; note = 2'-fluoroguanosine
  modified_base 65: mod_base = OTHER; note = 2'-Omethylguanosine
  modified_base 66: mod_base = OTHER; note = 2'-Omethylcytosine
  modified_base 67: mod_base = OTHER; note = 2'-Omethylguanosine
  modified_base 69: mod_base = OTHER; note = 2'-Omethyladenosine
  modified_base 72: mod_base = OTHER; note = 2'-Omethylcytosine
  modified_base 73: mod_base = OTHER; note = Guanosine phosphorothiorate
  modified_base 74: mod_base = OTHER; note = 2'-fluorocytosine phosphorothiorate
  modified_base 75: mod_base = OTHER; note = 2'-fluorocytosine

SEQ ID NO: 9507 - RNA, 75 nt, synthetic construct; identical to SEQ ID NO: 3299
  source 1..75: mol_type = other RNA
  modified_base 13: mod_base = OTHER; note = Adenosine phosphorothiorate
  modified_base 18: mod_base = OTHER; note = 2'-fluoroguanosine phosphorothiorate
  modified_base 21: mod_base = OTHER; note = 2'-fluoroguanosine phosphorothiorate
  modified_base 41: mod_base = OTHER; note = 2'-fluoroguanosine
  modified_base 47: mod_base = OTHER; note = 2'-fluorocytosine
  modified_base 69: mod_base = OTHER; note = 2'-fluoroguanosine phosphorothiorate
  modified_base 73: mod_base = OTHER; note = Cytosine phosphorothiorate

SEQ ID NO: 9508 - RNA, 76 nt, synthetic construct; identical to SEQ ID NO: 3342
  source 1..76: mol_type = other RNA
  modified_base 1: mod_base = OTHER; note = 2'-Omethylguanosine
  modified_base 2: mod_base = OTHER; note = 2'-Omethylguanosine
  modified_base 3: mod_base = OTHER; note = 2'-Omethylcytosine
  modified_base 4: mod_base = OTHER; note = 2'-Omethyluridine
  modified_base 5: mod_base = OTHER; note = 2'-Omethylcytosine
  modified_base 6: mod_base = OTHER; note = 2'-Omethylcytosine
  modified_base 14: mod_base = OTHER; note = 2'-Omethyladenosine
  modified_base 15: mod_base = OTHER; note = 2'-Omethyladenosine
  modified_base 16: mod_base = OTHER; note = 2'-Omethyluridine
  modified_base 17: mod_base = OTHER; note = 2'-Omethylguanosine
  modified_base 18: mod_base = OTHER; note = 2'-Omethylguanosine
  modified_base 20: mod_base = OTHER; note = 2'-Omethyluridine
  modified_base 25: mod_base = OTHER; note = 2'-Omethylcytosine
  modified_base 41: mod_base = OTHER; note = 2'-Omethylcytosine
  modified_base 42: mod_base = OTHER; note = 2'-Omethylguanosine
  modified_base 43: mod_base = OTHER; note = 2'-Omethyladenosine
  modified_base 44: mod_base = OTHER; note = 2'-Omethyladenosine
  modified_base 49: mod_base = OTHER; note = 2'-Omethylcytosine
  modified_base 50: mod_base = OTHER; note = 2'-Omethylcytosine
  modified_base 52: mod_base = OTHER; note = 2'-Omethylguanosine
  modified_base 54: mod_base = OTHER; note = 2'-Omethyluridine
  modified_base 55: mod_base = OTHER; note = Uridine phosphorothiorate
  modified_base 56: mod_base = OTHER; note = 2'-Omethylcytosine
  modified_base 57: mod_base = OTHER; note = 2'-fluoroguanosine
  modified_base 59: mod_base = OTHER; note = 2'-Omethylguanosine
  modified_base 61: mod_base = OTHER; note = 2'-Omethylcytosine
  modified_base 65: mod_base = OTHER; note = 2'-Omethylguanosine
  modified_base 73: mod_base = OTHER; note = 2'-Omethylguanosine

SEQ ID NO: 9509 - RNA, 86 nt, synthetic construct; identical to SEQ ID NO: 3290
  source 1..86: mol_type = other RNA
  modified_base 40: mod_base = OTHER; note = 2'-Omethylcytosine

SEQ ID NO: 9510 - RNA, 76 nt, synthetic construct; identical to SEQ ID NO: 625
  source 1..76: mol_type = other RNA
  modified_base 1: mod_base = OTHER; note = 2'-Omethylguanosine
  modified_base 2: mod_base = OTHER; note = 2'-Omethylguanosine
  modified_base 3: mod_base = OTHER; note = 2'-Omethylcytosine
  modified_base 4: mod_base = OTHER; note = 2'-Omethyluridine
  modified_base 5: mod_base = OTHER; note = 2'-Omethylcytosine
  modified_base 6: mod_base = OTHER; note = 2'-Omethylcytosine
  modified_base 13: mod_base = OTHER; note = 2'-Omethylcytosine
  modified_base 14: mod_base = OTHER; note = 2'-Omethyladenosine
  modified_base 16: mod_base = OTHER; note = 2'-Omethyluridine
  modified_base 17: mod_base = OTHER; note = 2'-Omethylguanosine
  modified_base 18: mod_base = OTHER; note = 2'-Omethylguanosine
  modified_base 19: mod_base = OTHER; note = 2'-fluoroadenosine phosphorothiorate
  modified_base 21: mod_base = OTHER; note = 2'-fluoroadenosine phosphorothiorate
  modified_base 23: mod_base = OTHER; note = 2'-Omethylcytosine
  modified_base 24: mod_base = OTHER; note = 2'-Omethylguanosine
  modified_base 25: mod_base = OTHER; note = 2'-Omethylcytosine phosphorothiorate
  modified_base 28: mod_base = OTHER; note = 2'-Omethyluridine
  modified_base 30: mod_base = OTHER; note = 2'-fluoroguanosine phosphorothiorate
  modified_base 31: mod_base = OTHER; note = 2'-Omethyladenosine phosphorothiorate
  modified_base 32: mod_base = OTHER; note = 2'-Omethylcytosine phosphorothiorate
  modified_base 33: mod_base = OTHER; note = 2'-fluorouridine
  modified_base 35: mod_base = OTHER; note = 2'-Omethylcytosine phosphorothiorate
  modified_base 37: mod_base = OTHER; note = Adenosine phosphorothiorate
  modified_base 40: mod_base = OTHER; note = 2'-Omethyluridine
  modified_base 41: mod_base = OTHER; note = 2'-fluorocytosine
  modified_base 42: mod_base = OTHER; note = Adenosine phosphorothiorate
  modified_base 44: mod_base = OTHER; note = 2'-Omethyladenosine
  modified_base 45: mod_base = OTHER; note = 2'-fluoroguanosine
  modified_base 48: mod_base = OTHER; note = 2'-Omethyluridine phosphorothiorate
  modified_base 49: mod_base = OTHER; note = 2'-Omethylcytosine
  modified_base 50: mod_base = OTHER; note = 2'-Omethylcytosine
  modified_base 52: mod_base = OTHER; note = 2'-Omethylguanosine
  modified_base 53: mod_base = OTHER; note = 2'-Omethylguanosine
  modified_base 54: mod_base = OTHER; note = Uridine phosphorothiorate
  modified_base 55: mod_base = OTHER; note = Uridine phosphorothiorate
  modified_base 56: mod_base = OTHER; note = 2'-Omethylcytosine phosphorothiorate
  modified_base 59: mod_base = OTHER; note = 2'-Omethylguanosine phosphorothiorate
  modified_base 61: mod_base = OTHER; note = Cytosine phosphorothiorate
  modified_base 62: mod_base = OTHER; note = 2'-Omethylcytosine
  modified_base 63: mod_base = OTHER; note = 2'-Omethylcytosine
  modified_base 64: mod_base = OTHER; note = 2'-Omethylguanosine phosphorothiorate
  modified_base 66: mod_base = OTHER; note = 2'-fluorocytosine
  modified_base 67: mod_base = OTHER; note = 2'-Omethylguanosine phosphorothiorate
  modified_base 68: mod_base = OTHER; note = 2'-fluoroguanosine
  modified_base 69: mod_base = OTHER; note = 2'-fluoroadenosine
  modified_base 73: mod_base = OTHER; note = 2'-Omethylguanosine phosphorothiorate
  modified_base 74: mod_base = OTHER; note = 2'-fluorocytosine phosphorothiorate
  modified_base 75: mod_base = OTHER; note = 2'-Omethylcytosine

SEQ ID NO: 9511 - RNA, 76 nt, synthetic construct; identical to SEQ ID NO: 625
  source 1..76: mol_type = other RNA
  modified_base 4: mod_base = OTHER; note = 2'-Omethyluridine
  modified_base 10: mod_base = OTHER; note = 2'-Omethylguanosine
  modified_base 13: mod_base = OTHER; note = Cytosine phosphorothiorate
  modified_base 14: mod_base = OTHER; note = Adenosine phosphorothiorate
  modified_base 16: mod_base = OTHER; note = 2'-fluorouridine phosphorothiorate
  modified_base 20: mod_base = OTHER; note = 2'-Omethyluridine
  modified_base 21: mod_base = OTHER; note = Adenosine phosphorothiorate
  modified_base 22: mod_base = OTHER; note = 2'-Omethylguanosine
  modified_base 23: mod_base = OTHER; note = 2'-fluorocytosine
  modified_base 25: mod_base = OTHER; note = 2'-Omethylcytosine
  modified_base 26: mod_base = OTHER; note = Adenosine phosphorothiorate
  modified_base 27: mod_base = OTHER; note = 2'-Omethyluridine
  modified_base 28: mod_base = OTHER; note = 2'-Omethyluridine
  modified_base 31: mod_base = OTHER; note = 2'-Omethyladenosine
  modified_base 37: mod_base = OTHER; note = Adenosine phosphorothiorate
  modified_base 38: mod_base = OTHER; note = 2'-fluoroadenosine
  modified_base 40: mod_base = OTHER; note = 2'-fluorouridine
  modified_base 43: mod_base = OTHER; note = 2'-fluoroadenosine
  modified_base 45: mod_base = OTHER; note = 2'-fluoroguanosine phosphorothiorate
  modified_base 47: mod_base = OTHER; note = Uridine phosphorothiorate
  modified_base 50: mod_base = OTHER; note = 2'-Omethylcytosine
  modified_base 51: mod_base = OTHER; note = 2'-Omethylguanosine
  modified_base 52: mod_base = OTHER; note = 2'-Omethylguanosine
  modified_base 54: mod_base = OTHER; note = 2'-Omethyluridine
  modified_base 60: mod_base = OTHER; note = 2'-Omethyluridine
  modified_base 65: mod_base = OTHER; note = 2'-Omethylguanosine
  modified_base 67: mod_base = OTHER; note = 2'-Omethylguanosine
  modified_base 68: mod_base = OTHER; note = Guanosine phosphorothiorate
  modified_base 69: mod_base = OTHER; note = 2'-fluoroadenosine
  modified_base 71: mod_base = OTHER; note = 2'-Omethyluridine phosphorothiorate
  modified_base 73: mod_base = OTHER; note = 2'-fluoroguanosine
  modified_base 76: mod_base = OTHER; note = 2'-fluoroadenosine

SEQ ID NO: 9512 - RNA, 75 nt, synthetic construct; identical to SEQ ID NO: 3336
  source 1..75: mol_type = other RNA
  modified_base 1: mod_base = OTHER; note = 2'-Omethylcytosine phosphorothiorate
  modified_base 15: mod_base = OTHER; note = 2'-Omethyluridine
  modified_base 18: mod_base = OTHER; note = 2'-fluoroguanosine
  modified_base 23: mod_base = OTHER; note = 2'-Omethylguanosine phosphorothiorate
  modified_base 25: mod_base = OTHER; note = 2'-fluoroadenosine
  modified_base 28: mod_base = OTHER; note = 2'-fluoroadenosine phosphorothiorate
  modified_base 29: mod_base = OTHER; note = 2'-Omethylguanosine phosphorothiorate
  modified_base 37: mod_base = OTHER; note = 2'-fluoroadenosine
  modified_base 38: mod_base = OTHER; note = 2'-fluorouridine
  modified_base 41: mod_base = OTHER; note = Guanosine phosphorothiorate
  modified_base 46: mod_base = OTHER; note = 2'-fluorouridine
  modified_base 49: mod_base = OTHER; note = 2'-fluoroadenosine
  modified_base 50: mod_base = OTHER; note = 2'-fluoroguanosine
  modified_base 61: mod_base = OTHER; note = 2'-fluorocytosine phosphorothiorate
  modified_base 72: mod_base = OTHER; note = 2'-Omethylguanosine
  modified_base 73: mod_base = OTHER; note = 2'-fluorocytosine phosphorothiorate
  modified_base 74: mod_base = OTHER; note = Cytosine phosphorothiorate

SEQ ID NO: 9513 - RNA, 86 nt, synthetic construct; identical to SEQ ID NO: 3290
  source 1..86: mol_type = other RNA
  modified_base 34: mod_base = OTHER; note = Uridine phosphorothiorate

SEQ ID NO: 9514 - RNA, 76 nt, synthetic construct; identical to SEQ ID NO: 3318
  source 1..76: mol_type = other RNA
  modified_base 1: mod_base = OTHER; note = 2'-Omethylcytosine phosphorothiorate
  modified_base 2: mod_base = OTHER; note = 2'-Omethylcytosine phosphorothiorate
  modified_base 75: mod_base = OTHER; note = 2'-Omethylcytosine phosphorothiorate

SEQ ID NO: 9515 - RNA, 76 nt, synthetic construct; identical to SEQ ID NO: 625
  source 1..76: mol_type = other RNA
  modified_base 1: mod_base = OTHER; note = 2'-Omethylguanosine phosphorothiorate
  modified_base 2: mod_base = OTHER; note = 2'-Omethylguanosine
  modified_base 13: mod_base = OTHER; note = 2'-Omethylcytosine
  modified_base 33: mod_base = OTHER; note = 2'-fluorouridine
  modified_base 35: mod_base = OTHER; note = Cytosine phosphorothiorate
  modified_base 37: mod_base = OTHER; note = Adenosine phosphorothiorate
  modified_base 52: mod_base = OTHER; note = 2'-Omethylguanosine
  modified_base 56: mod_base = OTHER; note = 2'-Omethylcytosine
  modified_base 62: mod_base = OTHER; note = 2'-Omethylcytosine
  modified_base 65: mod_base = OTHER; note = 2'-Omethylguanosine
  modified_base 73: mod_base = OTHER; note = 2'-Omethylguanosine
  modified_base 75: mod_base = OTHER; note = 2'-fluorocytosine phosphorothiorate

SEQ ID NO: 9516 - RNA, 73 nt, synthetic construct; identical to SEQ ID NO: 935
  source 1..73: mol_type = other RNA
  modified_base 1: mod_base = OTHER; note = 2'-Omethylguanosine phosphorothiorate
  modified_base 2: mod_base = OTHER; note = 2'-Omethylguanosine
  modified_base 3: mod_base = OTHER; note = 2'-Omethylcytosine
  modified_base 4: mod_base = OTHER; note = 2'-Omethyluridine
  modified_base 5: mod_base = OTHER; note = 2'-Omethylcytosine
  modified_base 6: mod_base = OTHER; note = 2'-Omethylcytosine
  modified_base 44: mod_base = OTHER; note = 2'-Omethyladenosine
  modified_base 45: mod_base = OTHER; note = 2'-Omethylguanosine
  modified_base 46: mod_base = OTHER; note = 2'-fluoroguanosine
  modified_base 48: mod_base = OTHER; note = 2'-fluorouridine
  modified_base 72: mod_base = OTHER; note = Cytosine phosphorothiorate

SEQ ID NO: 9517 - RNA, 76 nt, synthetic construct; identical to SEQ ID NO: 3318
  source 1..76: mol_type = other RNA
  modified_base 1: mod_base = OTHER; note = 2'-Omethylcytosine phosphorothiorate
  modified_base 2: mod_base = OTHER; note = 2'-Omethylcytosine
  modified_base 3: mod_base = OTHER; note = 2'-Omethyluridine
  modified_base 4: mod_base = OTHER; note = 2'-Omethyluridine
  modified_base 5: mod_base = OTHER; note = 2'-Omethylcytosine
  modified_base 6: mod_base = OTHER; note = 2'-Omethylguanosine
  modified_base 49: mod_base = OTHER; note = 2'-Omethylguanosine
  modified_base 50: mod_base = OTHER; note = 2'-Omethylcytosine
  modified_base 51: mod_base = OTHER; note = 2'-Omethyluridine
  modified_base 52: mod_base = OTHER; note = 2'-Omethylguanosine
  modified_base 53: mod_base = OTHER; note = 2'-Omethylguanosine
  modified_base 61: mod_base = OTHER; note = 2'-Omethylcytosine
  modified_base 62: mod_base = OTHER; note = 2'-Omethylcytosine
  modified_base 63: mod_base = OTHER; note = 2'-fluoroguanosine
  modified_base 64: mod_base = OTHER; note = 2'-Omethylguanosine
  modified_base 65: mod_base = OTHER; note = 2'-Omethylcytosine
  modified_base 66: mod_base = OTHER; note = 2'-Omethyluridine
  modified_base 67: mod_base = OTHER; note = 2'-Omethylcytosine
  modified_base 68: mod_base = OTHER; note = 2'-Omethylguanosine
  modified_base 69: mod_base = OTHER; note = 2'-fluoroadenosine
  modified_base 71: mod_base = OTHER; note = 2'-Omethylguanosine
  modified_base 72: mod_base = OTHER; note = 2'-Omethylguanosine

SEQ ID NO: 9518 - DNA, 76 bp, synthetic construct; identical to SEQ ID NO: 1924
  source 1..76: mol_type = other DNA
  modified_base 1: mod_base = OTHER; note = 2'-Omethylguanosine phosphorothiorate
  modified_base 2: mod_base = OTHER; note = 2'-Omethylguanosine phosphorothiorate
  modified_base 3: mod_base = OTHER; note = Cytosine phosphorothiorate
  modified_base 4: mod_base = OTHER; note = 2'-O-(2-Methoxyethyl) thymine
  modified_base 6: mod_base = OTHER; note = 2'-O-(2-Methoxyethyl) 5-methylcytosine phosphorothiorate
  modified_base 7: mod_base = OTHER; note = 2'-O-(2-Methoxyethyl) guanosine phosphorothiorate
  modified_base 11: mod_base = OTHER; note = 2'-O-(2-Methoxyethyl) 5-methylcytosine
  modified_base 12: mod_base = OTHER; note = Guanosine phosphorothiorate
  modified_base 13: mod_base = OTHER; note = 2'-Omethylcytosine
  modified_base 15: mod_base = OTHER; note = Adenosine phosphorothiorate
  modified_base 21: mod_base = OTHER; note = Adenosine phosphorothiorate
  modified_base 22: mod_base = OTHER; note = Guanosine phosphorothiorate
  modified_base 23: mod_base = OTHER; note = deoxycytosine phosphorothiorate
  modified_base 24: mod_base = OTHER; note = 2'-O-(2-Methoxyethyl) guanosine
  modified_base 25: mod_base = OTHER; note = 2'-fluorocytosine
  modified_base 27: mod_base = OTHER; note = deoxyuridine phosphorothiorate
  modified_base 29: mod_base = OTHER; note = 2'-O-(2-Methoxyethyl) guanosine phosphorothiorate
  modified_base 30: mod_base = OTHER; note = 2'-Omethylguanosine phosphorothiorate
  modified_base 32: mod_base = OTHER; note = Cytosine phosphorothiorate
  modified_base 33: mod_base = OTHER; note = 2'-O-(2-Methoxyethyl) thymine phosphorothiorate
  modified_base 34: mod_base = OTHER; note = 2'-fluorouridine
  modified_base 39: mod_base = OTHER; note = Uridine phosphorothiorate
  modified_base 41: mod_base = OTHER; note = Cytosine phosphorothiorate
  modified_base 45: mod_base = OTHER; note = 2'-O-(2-Methoxyethyl) guanosine phosphorothiorate
  modified_base 46: mod_base = OTHER; note = 2'-O-(2-Methoxyethyl) guanosine phosphorothiorate
  modified_base 47: mod_base = OTHER; note = 2'-Omethyluridine
  modified_base 52: mod_base = OTHER; note = 2'-O-(2-Methoxyethyl) guanosine
  modified_base 53: mod_base = OTHER; note = Guanosine phosphorothiorate
  modified_base 55: mod_base = OTHER; note = Uridine phosphorothiorate
  modified_base 56: mod_base = OTHER; note = 2'-O-(2-Methoxyethyl) 5-methylcytosine
  modified_base 62: mod_base = OTHER; note = Cytosine phosphorothiorate
  modified_base 63: mod_base = OTHER; note = 2'-O-(2-Methoxyethyl) 5-methylcytosine
  modified_base 64: mod_base = OTHER; note = Guanosine phosphorothiorate
  modified_base 65: mod_base = OTHER; note = 2'-Omethylguanosine
  modified_base 66: mod_base = OTHER; note = 2'-O-(2-Methoxyethyl) 5-methylcytosine phosphorothiorate
  modified_base 67: mod_base = OTHER; note = deoxyguanosine phosphorothiorate
  modified_base 68: mod_base = OTHER; note = 2'-Omethylguanosine
  modified_base 69: mod_base = OTHER; note = Adenosine phosphorothiorate
  modified_base 71: mod_base = OTHER; note = Uridine phosphorothiorate
  modified_base 72: mod_base = OTHER; note = 2'-O-(2-Methoxyethyl) 5-methylcytosine
  modified_base 74: mod_base = OTHER; note = Cytosine phosphorothiorate
  modified_base 75: mod_base = OTHER; note = 2'-Omethylcytosine phosphorothiorate
  misc_feature 1..7: note = RNA
  misc_feature 8: note = DNA
  misc_feature 9: note = RNA
  misc_feature 10: note = DNA
  misc_feature 11..15: note = RNA
  misc_feature 16: note = DNA
  misc_feature 17..22: note = RNA
  misc_feature 23: note = DNA
  misc_feature 24..26: note = RNA
  misc_feature 27: note = DNA
  misc_feature 28..50: note = RNA
  misc_feature 51: note = DNA
  misc_feature 52..66: note = RNA
  misc_feature 67: note = DNA
  misc_feature 68..75: note = RNA
  misc_feature 76: note = DNA

SEQ ID NO: 9519 - RNA, 76 nt, synthetic construct; identical to SEQ ID NO: 625
  source 1..76: mol_type = other RNA
  modified_base 1: mod_base = OTHER; note = 2'-fluoroguanosine
  modified_base 3: mod_base = OTHER; note = 2'-fluorocytosine phosphorothiorate
  modified_base 6: mod_base = OTHER; note = 2'-fluorocytosine
  modified_base 10: mod_base = OTHER; note = 2'-Omethylguanosine
  modified_base 11: mod_base = OTHER; note = 2'-Omethylcytosine phosphorothiorate
  modified_base 12: mod_base = OTHER; note = Guanosine phosphorothiorate
  modified_base 14: mod_base = OTHER; note = 2'-Omethyladenosine
  modified_base 18: mod_base = OTHER; note = 2'-fluoroguanosine
  modified_base 20: mod_base = OTHER; note = Uridine phosphorothiorate
  modified_base 22: mod_base = OTHER; note = Guanosine phosphorothiorate
  modified_base 23: mod_base = OTHER; note = 2'-Omethylcytosine
  modified_base 24: mod_base = OTHER; note = 2'-Omethylguanosine
  modified_base 25: mod_base = OTHER; note = 2'-fluorocytosine
  modified_base 30: mod_base = OTHER; note = Guanosine phosphorothiorate
  modified_base 31: mod_base = OTHER; note = 2'-fluoroadenosine
  modified_base 33: mod_base = OTHER; note = Uridine phosphorothiorate
  modified_base 38: mod_base = OTHER; note = 2'-fluoroadenosine
  modified_base 41: mod_base = OTHER; note = 2'-fluorocytosine phosphorothiorate
  modified_base 42: mod_base = OTHER; note = 2'-Omethyladenosine
  modified_base 44: mod_base = OTHER; note = Adenosine phosphorothiorate
  modified_base 45: mod_base = OTHER; note = 2'-Omethylguanosine
  modified_base 46: mod_base = OTHER; note = Guanosine phosphorothiorate
  modified_base 47: mod_base = OTHER; note = 2'-Omethyluridine
  modified_base 49: mod_base = OTHER; note = 2'-fluorocytosine
  modified_base 51: mod_base = OTHER; note = 2'-Omethylguanosine
  modified_base 55: mod_base = OTHER; note = Uridine phosphorothiorate
  modified_base 56: mod_base = OTHER; note = 2'-fluorocytosine
  modified_base 57: mod_base = OTHER; note = 2'-fluoroguanosine
  modified_base 61: mod_base = OTHER; note = 2'-fluorocytosine
  modified_base 64: mod_base = OTHER; note = 2'-fluoroguanosine
  modified_base 65: mod_base = OTHER; note = 2'-Omethylguanosine
  modified_base 66: mod_base = OTHER; note = 2'-Omethylcytosine
  modified_base 67: mod_base = OTHER; note = Guanosine phosphorothiorate
  modified_base 68: mod_base = OTHER; note = 2'-Omethylguanosine
  modified_base 71: mod_base = OTHER; note = 2'-Omethyluridine
  modified_base 73: mod_base = OTHER; note = 2'-Omethylguanosine phosphorothiorate
  modified_base 74: mod_base = OTHER; note = 2'-fluorocytosine
  modified_base 75: mod_base = OTHER; note = 2'-Omethylcytosine phosphorothiorate

SEQ ID NO: 9520 - RNA, 86 nt, synthetic construct; identical to SEQ ID NO: 3290
  source 1..86: mol_type = other RNA
  modified_base 1: mod_base = OTHER; note = 2'-Omethyladenosine
  modified_base 13: mod_base = OTHER; note = 2'-Omethylguanosine
  modified_base 14: mod_base = OTHER; note = 2'-Omethyladenosine
  modified_base 15: mod_base = OTHER; note = 2'-Omethylguanosine
  modified_base 16: mod_base = OTHER; note = 2'-Omethyluridine
  modified_base 17: mod_base = OTHER; note = 2'-Omethylguanosine
  modified_base 18: mod_base = OTHER; note = 2'-Omethylguanosine
  modified_base 19: mod_base = OTHER; note = Uridine phosphorothiorate
  modified_base 20: mod_base = OTHER; note = 2'-Omethyluridine
  modified_base 21: mod_base = OTHER; note = Adenosine phosphorothiorate
  modified_base 25: mod_base = OTHER; note = 2'-Omethylcytosine
  modified_base 41: mod_base = OTHER; note = 2'-fluorocytosine
  modified_base 42: mod_base = OTHER; note = 2'-Omethyladenosine
  modified_base 43: mod_base = OTHER; note = 2'-Omethyladenosine
  modified_base 44: mod_base = OTHER; note = 2'-fluorouridine
  modified_base 59: mod_base = OTHER; note = 2'-Omethylguanosine
  modified_base 60: mod_base = OTHER; note = 2'-Omethyluridine
  modified_base 61: mod_base = OTHER; note = 2'-Omethylguanosine
  modified_base 62: mod_base = OTHER; note = 2'-Omethylguanosine
  modified_base 63: mod_base = OTHER; note = 2'-Omethylguanosine
  modified_base 64: mod_base = OTHER; note = Uridine phosphorothiorate
  modified_base 65: mod_base = OTHER; note = Uridine phosphorothiorate
  modified_base 71: mod_base = OTHER; note = 2'-Omethylcytosine
  modified_base 75: mod_base = OTHER; note = 2'-Omethylcytosine
  modified_base 83: mod_base = OTHER; note = 2'-Omethyladenosine

SEQ ID NO: 9521 - RNA, 76 nt, synthetic construct; identical to SEQ ID NO: 3289
  source 1..76: mol_type = other RNA
  modified_base 1: mod_base = OTHER; note = 2'-Omethylguanosine
  modified_base 2: mod_base = OTHER; note = 2'-Omethylcytosine
  modified_base 3: mod_base = OTHER; note = 2'-Omethylcytosine
  modified_base 4: mod_base = OTHER; note = 2'-Omethyluridine
  modified_base 5: mod_base = OTHER; note = 2'-Omethylguanosine
  modified_base 6: mod_base = OTHER; note = 2'-Omethylguanosine
  modified_base 13: mod_base = OTHER; note = 2'-Omethylcytosine
  modified_base 18: mod_base = OTHER; note = 2'-Omethylguanosine
  modified_base 19: mod_base = OTHER; note = 2'-Omethylguanosine
  modified_base 25: mod_base = OTHER; note = 2'-Omethylcytosine
  modified_base 33: mod_base = OTHER; note = Uridine phosphorothiorate
  modified_base 34: mod_base = OTHER; note = 2'-Omethyluridine
  modified_base 35: mod_base = OTHER; note = Uridine phosphorothiorate
  modified_base 37: mod_base = OTHER; note = Adenosine phosphorothiorate
  modified_base 38: mod_base = OTHER; note = Adenosine phosphorothiorate
  modified_base 41: mod_base = OTHER; note = 2'-fluorouridine
  modified_base 42: mod_base = OTHER; note = 2'-Omethylguanosine
  modified_base 43: mod_base = OTHER; note = 2'-Omethyladenosine
  modified_base 44: mod_base = OTHER; note = 2'-fluoroguanosine
  modified_base 49: mod_base = OTHER; note = 2'-Omethylcytosine
  modified_base 50: mod_base = OTHER; note = 2'-Omethyladenosine
  modified_base 51: mod_base = OTHER; note = 2'-Omethylguanosine
  modified_base 52: mod_base = OTHER; note = 2'-Omethylguanosine
  modified_base 53: mod_base = OTHER; note = 2'-Omethylguanosine
  modified_base 54: mod_base = OTHER; note = Uridine phosphorothiorate
  modified_base 55: mod_base = OTHER; note = Uridine phosphorothiorate
  modified_base 61: mod_base = OTHER; note = 2'-Omethylcytosine
  modified_base 65: mod_base = OTHER; note = 2'-Omethylguanosine
  modified_base 73: mod_base = OTHER; note = 2'-Omethylguanosine

SEQ ID NO: 9522 - RNA, 75 nt, synthetic construct; identical to SEQ ID NO: 1045
  source 1..75: mol_type = other RNA
  modified_base 2: mod_base = OTHER; note = 2'-Omethylguanosine phosphorothiorate
  modified_base 12: mod_base = OTHER; note = Guanosine phosphorothiorate
  modified_base 13: mod_base = OTHER; note = 2'-fluorouridine
  modified_base 20: mod_base = OTHER; note = 2'-fluoroadenosine phosphorothiorate
  modified_base 21: mod_base = OTHER; note = 2'-fluoroadenosine
  modified_base 25: mod_base = OTHER; note = Cytosine phosphorothiorate
  modified_base 40: mod_base = OTHER; note = 2'-Omethylcytosine
  modified_base 48: mod_base = OTHER; note = 2'-fluorocytosine
  modified_base 65: mod_base = OTHER; note = Uridine phosphorothiorate
  modified_base 66: mod_base = OTHER; note = 2'-fluoroguanosine
  modified_base 67: mod_base = OTHER; note = 2'-fluoroguanosine
  modified_base 73: mod_base = OTHER; note = Cytosine phosphorothiorate

SEQ ID NO: 9523 - RNA, 76 nt, synthetic construct; identical to SEQ ID NO: 625
  source 1..76: mol_type = other RNA
  modified_base 1: mod_base = OTHER; note = 2'-Omethylguanosine phosphorothiorate
  modified_base 2: mod_base = OTHER; note = 2'-Omethylguanosine
  modified_base 3: mod_base = OTHER; note = 2'-Omethylcytosine
  modified_base 4: mod_base = OTHER; note = 2'-Omethyluridine
  modified_base 5: mod_base = OTHER; note = 2'-Omethylcytosine
  modified_base 6: mod_base = OTHER; note = 2'-Omethylcytosine
  modified_base 10: mod_base = OTHER; note = 2'-Omethylguanosine
  modified_base 11: mod_base = OTHER; note = 2'-Omethylcytosine
  modified_base 12: mod_base = OTHER; note = 2'-Omethylguanosine
  modified_base 13: mod_base = OTHER; note = 2'-Omethylcytosine
  modified_base 14: mod_base = OTHER; note = 2'-Omethyladenosine
  modified_base 15: mod_base = OTHER; note = 2'-Omethyladenosine
  modified_base 16: mod_base = OTHER; note = 2'-Omethyluridine
  modified_base 17: mod_base = OTHER; note = 2'-Omethylguanosine
  modified_base 18: mod_base = OTHER; note = 2'-Omethylguanosine
  modified_base 19: mod_base = OTHER; note = 2'-Omethyladenosine
  modified_base 20: mod_base = OTHER; note = 2'-Omethyluridine
  modified_base 22: mod_base = OTHER; note = 2'-Omethylguanosine
  modified_base 23: mod_base = OTHER; note = 2'-Omethylcytosine
  modified_base 24: mod_base = OTHER; note = 2'-Omethylguanosine
  modified_base 25: mod_base = OTHER; note = 2'-Omethylcytosine
  modified_base 49: mod_base = OTHER; note = 2'-Omethylcytosine
  modified_base 50: mod_base = OTHER; note = 2'-Omethylcytosine
  modified_base 51: mod_base = OTHER; note = 2'-Omethylguanosine
  modified_base 52: mod_base = OTHER; note = 2'-Omethylguanosine
  modified_base 53: mod_base = OTHER; note = 2'-Omethylguanosine
  modified_base 61: mod_base = OTHER; note = 2'-Omethylcytosine
  modified_base 62: mod_base = OTHER; note = 2'-Omethylcytosine
  modified_base 63: mod_base = OTHER; note = 2'-fluorocytosine
  modified_base 64: mod_base = OTHER; note = 2'-Omethylguanosine
  modified_base 65: mod_base = OTHER; note = 2'-Omethylguanosine
  modified_base 66: mod_base = OTHER; note = 2'-Omethylcytosine
  modified_base 67: mod_base = OTHER; note = 2'-Omethylguanosine
  modified_base 68: mod_base = OTHER; note = 2'-Omethylguanosine
  modified_base 69: mod_base = OTHER; note = 2'-Omethyladenosine
  modified_base 71: mod_base = OTHER; note = 2'-Omethyluridine
  modified_base 72: mod_base = OTHER; note = 2'-Omethylcytosine

SEQ ID NO: 9524 - RNA, 76 nt, synthetic construct
  source 1..76: mol_type = other RNA
ggcatcgtggcgcaatggatagcgcattggacttcaaattcaaaggttccgggttcgagtcccggcgatgtcgcca

SEQ ID NO: 9525 - RNA, 86 nt, synthetic construct; identical to SEQ ID NO: 3290
  source 1..86: mol_type = other RNA
  modified_base 14: mod_base = OTHER; note = 2'-Omethyladenosine

SEQ ID NO: 9526 - RNA, 76 nt, synthetic construct; identical to SEQ ID NO: 625
  source 1..76: mol_type = other RNA
  modified_base 2: mod_base = OTHER; note = 2'-fluoroguanosine
  modified_base 3: mod_base = OTHER; note = 2'-Omethylcytosine phosphorothiorate
  modified_base 4: mod_base = OTHER; note = 2'-Omethyluridine
  modified_base 5: mod_base = OTHER; note = 2'-Omethylcytosine phosphorothiorate
  modified_base 6: mod_base = OTHER; note = 2'-fluorocytosine
  modified_base 7: mod_base = OTHER; note = Guanosine phosphorothiorate
  modified_base 10: mod_base = OTHER; note = Guanosine phosphorothiorate
  modified_base 11: mod_base = OTHER; note = 2'-Omethylcytosine
  modified_base 13: mod_base = OTHER; note = 2'-Omethylcytosine phosphorothiorate
  modified_base 14: mod_base = OTHER; note = 2'-Omethyladenosine
  modified_base 20: mod_base = OTHER; note = Uridine phosphorothiorate
  modified_base 21: mod_base = OTHER; note = Adenosine phosphorothiorate
  modified_base 22: mod_base = OTHER; note = 2'-fluoroguanosine
  modified_base 25: mod_base = OTHER; note = 2'-Omethylcytosine
  modified_base 28: mod_base = OTHER; note = 2'-Omethyluridine
  modified_base 31: mod_base = OTHER; note = 2'-fluoroadenosine
  modified_base 34: mod_base = OTHER; note = 2'-fluorouridine
  modified_base 41: mod_base = OTHER; note = 2'-Omethylcytosine phosphorothiorate
  modified_base 42: mod_base = OTHER; note = Adenosine phosphorothiorate
  modified_base 45: mod_base = OTHER; note = 2'-Omethylguanosine
  modified_base 48: mod_base = OTHER; note = Uridine phosphorothiorate
  modified_base 49: mod_base = OTHER; note = 2'-Omethylcytosine phosphorothiorate
  modified_base 51: mod_base = OTHER; note = 2'-Omethylguanosine
  modified_base 52: mod_base = OTHER; note = 2'-fluoroguanosine
  modified_base 53: mod_base = OTHER; note = 2'-Omethylguanosine
  modified_base 55: mod_base = OTHER; note = Uridine phosphorothiorate
  modified_base 57: mod_base = OTHER; note = 2'-Omethylguanosine
  modified_base 59: mod_base = OTHER; note = 2'-Omethylguanosine
  modified_base 60: mod_base = OTHER; note = 2'-fluorouridine
  modified_base 62: mod_base = OTHER; note = 2'-Omethylcytosine
  modified_base 69: mod_base = OTHER; note = 2'-fluoroadenosine phosphorothiorate
  modified_base 70: mod_base = OTHER; note = 2'-fluoroguanosine
  modified_base 73: mod_base = OTHER; note = Guanosine phosphorothiorate
  modified_base 74: mod_base = OTHER; note = 2'-Omethylcytosine
  modified_base 75: mod_base = OTHER; note = 2'-fluorocytosine phosphorothiorate
  modified_base 76: mod_base = OTHER; note = 2'-fluoroadenosine

SEQ ID NO: 9527 - RNA, 85 nt, synthetic construct; identical to SEQ ID NO: 3297
  source 1..85: mol_type = other RNA
  modified_base 1: mod_base = OTHER; note = 2'-Omethylguanosine phosphorothiorate
  modified_base 2: mod_base = OTHER; note = 2'-Omethylcytosine
  modified_base 15: mod_base = OTHER; note = 2'-Omethylguanosine
  modified_base 22: mod_base = OTHER; note = 2'-fluoroadenosine
  modified_base 34: mod_base = OTHER; note = 2'-fluorouridine
  modified_base 44: mod_base = OTHER; note = Uridine phosphorothiorate
  modified_base 51: mod_base = OTHER; note = 2'-fluorouridine phosphorothiorate
  modified_base 61: mod_base = OTHER; note = 2'-Omethylguanosine phosphorothiorate
  modified_base 81: mod_base = OTHER; note = 2'-Omethylcytosine phosphorothiorate

SEQ ID NO: 9528 - RNA, 75 nt, synthetic construct; identical to SEQ ID NO: 3306
  source 1..75: mol_type = other RNA
  modified_base 1: mod_base = OTHER; note = 2'-Omethylguanosine
  modified_base 13: mod_base = OTHER; note = 2'-Omethylcytosine
  modified_base 14: mod_base = OTHER; note = 2'-Omethyladenosine
  modified_base 15: mod_base = OTHER; note = 2'-Omethyladenosine
  modified_base 16: mod_base = OTHER; note = 2'-Omethylcytosine
  modified_base 17: mod_base = OTHER; note = 2'-Omethylguanosine
  modified_base 18: mod_base = OTHER; note = 2'-Omethylguanosine
  modified_base 19: mod_base = OTHER; note = Uridine phosphorothiorate
  modified_base 20: mod_base = OTHER; note = Adenosine phosphorothiorate
  modified_base 24: mod_base = OTHER; note = 2'-Omethylcytosine
  modified_base 32: mod_base = OTHER; note = 2'-fluorouridine
  modified_base 33: mod_base = OTHER; note = 2'-Omethylcytosine
  modified_base 34: mod_base = OTHER; note = Uridine phosphorothiorate
  modified_base 36: mod_base = OTHER; note = Guanosine phosphorothiorate
  modified_base 37: mod_base = OTHER; note = Adenosine phosphorothiorate
  modified_base 40: mod_base = OTHER; note = 2'-Omethyladenosine
  modified_base 41: mod_base = OTHER; note = 2'-Omethylguanosine
  modified_base 42: mod_base = OTHER; note = 2'-Omethyladenosine
  modified_base 43: mod_base = OTHER; note = 2'-Omethyladenosine
  modified_base 48: mod_base = OTHER; note = 2'-Omethylguanosine
  modified_base 49: mod_base = OTHER; note = 2'-Omethylcytosine
  modified_base 51: mod_base = OTHER; note = 2'-Omethyluridine
  modified_base 53: mod_base = OTHER; note = Uridine phosphorothiorate
  modified_base 54: mod_base = OTHER; note = Uridine phosphorothiorate
  modified_base 60: mod_base = OTHER; note = 2'-Omethylcytosine
  modified_base 64: mod_base = OTHER; note = 2'-Omethyluridine
  modified_base 72: mod_base = OTHER; note = 2'-Omethyladenosine

SEQ ID NO: 9529 - RNA, 76 nt, synthetic construct; identical to SEQ ID NO: 3490
  source 1..76: mol_type = other RNA
  modified_base 1: mod_base = OTHER; note = 2'-Omethylguanosine phosphorothiorate
  modified_base 2: mod_base = OTHER; note = 2'-Omethylguanosine
  modified_base 3: mod_base = OTHER; note = 2'-Omethylcytosine
  modified_base 4: mod_base = OTHER; note = 2'-Omethyluridine
  modified_base 5: mod_base = OTHER; note = 2'-Omethylcytosine
  modified_base 6: mod_base = OTHER; note = 2'-Omethylcytosine
  modified_base 49: mod_base = OTHER; note = 2'-Omethylguanosine
  modified_base 50: mod_base = OTHER; note = 2'-Omethylcytosine
  modified_base 51: mod_base = OTHER; note = 2'-Omethylguanosine
  modified_base 52: mod_base = OTHER; note = 2'-Omethylguanosine
  modified_base 53: mod_base = OTHER; note = 2'-Omethylguanosine
  modified_base 61: mod_base = OTHER; note = 2'-Omethylcytosine
  modified_base 62: mod_base = OTHER; note = 2'-Omethylcytosine
  modified_base 63: mod_base = OTHER; note = 2'-fluorocytosine
  modified_base 64: mod_base = OTHER; note = 2'-Omethylguanosine
  modified_base 65: mod_base = OTHER; note = 2'-Omethylcytosine
  modified_base 66: mod_base = OTHER; note = 2'-Omethylcytosine
  modified_base 67: mod_base = OTHER; note = 2'-Omethylguanosine
  modified_base 68: mod_base = OTHER; note = 2'-Omethylguanosine
  modified_base 69: mod_base = OTHER; note = 2'-Omethyladenosine
  modified_base 71: mod_base = OTHER; note = 2'-Omethyluridine
  modified_base 72: mod_base = OTHER; note = 2'-Omethylcytosine

SEQ ID NO: 9530 - RNA, 75 nt, synthetic construct; identical to SEQ ID NO: 3311
  source 1..75: mol_type = other RNA
  modified_base 1: mod_base = OTHER; note = 2'-Omethylguanosine phosphorothiorate
  modified_base 2: mod_base = OTHER; note = 2'-Omethylguanosine phosphorothiorate
  modified_base 11: mod_base = OTHER; note = 2'-fluorouridine
  modified_base 20: mod_base = OTHER; note = 2'-Omethyladenosine phosphorothiorate
  modified_base 21: mod_base = OTHER; note = 2'-fluoroadenosine
  modified_base 22: mod_base = OTHER; note = 2'-fluoroguanosine
  modified_base 25: mod_base = OTHER; note = 2'-fluorocytosine phosphorothiorate
  modified_base 36: mod_base = OTHER; note = 2'-Omethyladenosine
  modified_base 37: mod_base = OTHER; note = Adenosine phosphorothiorate
  modified_base 38: mod_base = OTHER; note = 2'-Omethyladenosine
  modified_base 41: mod_base = OTHER; note = 2'-fluorocytosine
  modified_base 52: mod_base = OTHER; note = 2'-fluoroguanosine phosphorothiorate
  modified_base 58: mod_base = OTHER; note = 2'-fluoroguanosine phosphorothiorate
  modified_base 60: mod_base = OTHER; note = 2'-fluorocytosine
  modified_base 61: mod_base = OTHER; note = 2'-fluorouridine phosphorothiorate
  modified_base 63: mod_base = OTHER; note = Guanosine phosphorothiorate
  modified_base 64: mod_base = OTHER; note = Guanosine phosphorothiorate
  modified_base 67: mod_base = OTHER; note = 2'-fluoroguanosine
  modified_base 73: mod_base = OTHER; note = Cytosine phosphorothiorate
  modified_base 74: mod_base = OTHER; note = Cytosine phosphorothiorate
  modified_base 75: mod_base = OTHER; note = 2'-Omethyladenosine

SEQ ID NO: 9531 - RNA, 75 nt, synthetic construct; identical to SEQ ID NO: 1045
  source 1..75: mol_type = other RNA
  modified_base 2: mod_base = OTHER; note = 2'-Omethylguanosine phosphorothiorate
  modified_base 3: mod_base = OTHER; note = 2'-Omethyluridine
  modified_base 4: mod_base = OTHER; note = 2'-fluorouridine
  modified_base 12: mod_base = OTHER; note = 2'-Omethylguanosine
  modified_base 13: mod_base = OTHER; note = 2'-Omethyluridine
  modified_base 15: mod_base = OTHER; note = 2'-Omethyladenosine phosphorothiorate
  modified_base 16: mod_base = OTHER; note = 2'-Omethyluridine phosphorothiorate
  modified_base 17: mod_base = OTHER; note = 2'-Omethylguanosine phosphorothiorate
  modified_base 18: mod_base = OTHER; note = 2'-Omethylguanosine phosphorothiorate
  modified_base 19: mod_base = OTHER; note = 2'-Omethyluridine phosphorothiorate
  modified_base 20: mod_base = OTHER; note = 2'-Omethyladenosine
  modified_base 39: mod_base = OTHER; note = 2'-Omethyluridine
  modified_base 45: mod_base = OTHER; note = 2'-Omethylguanosine
  modified_base 52: mod_base = OTHER; note = 2'-Omethylguanosine
  modified_base 53: mod_base = OTHER; note = 2'-Omethyluridine phosphorothiorate
  modified_base 60: mod_base = OTHER; note = 2'-Omethylcytosine
  modified_base 65: mod_base = OTHER; note = 2'-Omethyluridine
  modified_base 66: mod_base = OTHER; note = 2'-Omethylguanosine
  modified_base 67: mod_base = OTHER; note = 2'-Omethylguanosine
  modified_base 69: mod_base = OTHER; note = 2'-fluoroadenosine
  modified_base 72: mod_base = OTHER; note = 2'-Omethyluridine
  modified_base 73: mod_base = OTHER; note = Cytosine phosphorothiorate
  modified_base 74: mod_base = OTHER; note = 2'-Omethylcytosine phosphorothiorate
  modified_base 75: mod_base = OTHER; note = 2'-Omethyladenosine

SEQ ID NO: 9532 - RNA, 85 nt, synthetic construct; identical to SEQ ID NO: 3288
  source 1..85: mol_type = other RNA
  modified_base 1: mod_base = OTHER; note = 2'-fluorocytosine
  modified_base 5: mod_base = OTHER; note = 2'-fluoroguanosine
  modified_base 12: mod_base = OTHER; note = Guanosine phosphorothiorate
  modified_base 23: mod_base = OTHER; note = 2'-fluoroguanosine
  modified_base 27: mod_base = OTHER; note = 2'-Omethyluridine phosphorothiorate
  modified_base 28: mod_base = OTHER; note = 2'-fluoroguanosine
  modified_base 33: mod_base = OTHER; note = 2'-fluorouridine
  modified_base 35: mod_base = OTHER; note = 2'-fluoroadenosine phosphorothiorate
  modified_base 40: mod_base = OTHER; note = Cytosine phosphorothiorate
  modified_base 51: mod_base = OTHER; note = 2'-Omethyluridine
  modified_base 53: mod_base = OTHER; note = Uridine phosphorothiorate
  modified_base 55: mod_base = OTHER; note = 2'-Omethylcytosine
  modified_base 57: mod_base = OTHER; note = 2'-Omethylcytosine
  modified_base 67: mod_base = OTHER; note = Adenosine phosphorothiorate
  modified_base 76: mod_base = OTHER; note = Cytosine phosphorothiorate
  modified_base 79: mod_base = OTHER; note = 2'-fluoroguanosine phosphorothiorate
  modified_base 84: mod_base = OTHER; note = 2'-Omethylcytosine

SEQ ID NO: 9533 - RNA, 75 nt, synthetic construct; identical to SEQ ID NO: 3306
  source 1..75: mol_type = other RNA
  modified_base 1: mod_base = OTHER; note = 2'-Omethylguanosine phosphorothiorate
  modified_base 2: mod_base = OTHER; note = 2'-Omethyladenosine phosphorothiorate
  modified_base 3: mod_base = OTHER; note = 2'-Omethylcytosine
  modified_base 4: mod_base = OTHER; note = 2'-Omethylcytosine
  modified_base 5: mod_base = OTHER; note = 2'-Omethyluridine
  modified_base 6: mod_base = OTHER; note = 2'-Omethylcytosine
  modified_base 16: mod_base = OTHER; note = 2'-Omethylcytosine
  modified_base 17: mod_base = OTHER; note = 2'-Omethylguanosine
  modified_base 18: mod_base = OTHER; note = 2'-Omethylguanosine
  modified_base 32: mod_base = OTHER; note = 2'-fluorouridine
  modified_base 34: mod_base = OTHER; note = Uridine phosphorothiorate
  modified_base 36: mod_base = OTHER; note = Guanosine phosphorothiorate
  modified_base 37: mod_base = OTHER; note = Adenosine phosphorothiorate
  modified_base 43: mod_base = OTHER; note = 2'-Omethyladenosine
  modified_base 44: mod_base = OTHER; note = 2'-Omethylguanosine
  modified_base 45: mod_base = OTHER; note = 2'-fluoroguanosine
  modified_base 46: mod_base = OTHER; note = 2'-fluorouridine
  modified_base 47: mod_base = OTHER; note = 2'-fluorouridine
  modified_base 55: mod_base = OTHER; note = 2'-Omethylcytosine
  modified_base 58: mod_base = OTHER; note = 2'-Omethyladenosine
  modified_base 60: mod_base = OTHER; note = 2'-Omethylcytosine
  modified_base 61: mod_base = OTHER; note = 2'-Omethyladenosine
  modified_base 62: mod_base = OTHER; note = 2'-fluorocytosine
  modified_base 63: mod_base = OTHER; note = 2'-Omethylguanosine
  modified_base 64: mod_base = OTHER; note = 2'-Omethyluridine
  modified_base 65: mod_base = OTHER; note = 2'-Omethylcytosine
  modified_base 66: mod_base = OTHER; note = 2'-Omethylguanosine
  modified_base 67: mod_base = OTHER; note = 2'-Omethylguanosine
  modified_base 72: mod_base = OTHER; note = 2'-Omethyladenosine

SEQ ID NO: 9534 - RNA, 86 nt, synthetic construct; identical to SEQ ID NO: 3290
  source 1..86: mol_type = other RNA
  modified_base 80: mod_base = OTHER; note = 2'-fluoroguanosine

SEQ ID NO: 9535 - RNA, 75 nt, synthetic construct; identical to SEQ ID NO: 1045
  source 1..75: mol_type = other RNA
  modified_base 1: mod_base = OTHER; note = 2'-Omethylguanosine
  modified_base 2: mod_base = OTHER; note = 2'-Omethylguanosine
  modified_base 3: mod_base = OTHER; note = 2'-Omethyluridine
  modified_base 4: mod_base = OTHER; note = 2'-Omethyluridine
  modified_base 5: mod_base = OTHER; note = 2'-Omethylcytosine
  modified_base 6: mod_base = OTHER; note = 2'-Omethylcytosine
  modified_base 13: mod_base = OTHER; note = 2'-Omethyluridine
  modified_base 14: mod_base = OTHER; note = 2'-Omethyladenosine
  modified_base 15: mod_base = OTHER; note = 2'-Omethyladenosine
  modified_base 16: mod_base = OTHER; note = 2'-Omethyluridine
  modified_base 17: mod_base = OTHER; note = 2'-Omethylguanosine
  modified_base 18: mod_base = OTHER; note = 2'-Omethylguanosine
  modified_base 19: mod_base = OTHER; note = Uridine phosphorothiorate
  modified_base 20: mod_base = OTHER; note = 2'-Omethyladenosine
  modified_base 21: mod_base = OTHER; note = Adenosine phosphorothiorate
  modified_base 25: mod_base = OTHER; note = 2'-Omethylcytosine
  modified_base 33: mod_base = OTHER; note = Uridine phosphorothiorate
  modified_base 34: mod_base = OTHER; note = 2'-Omethyluridine
  modified_base 35: mod_base = OTHER; note = Uridine phosphorothiorate
  modified_base 37: mod_base = OTHER; note = Adenosine phosphorothiorate
  modified_base 38: mod_base = OTHER; note = Adenosine phosphorothiorate
  modified_base 48: mod_base = OTHER; note = 2'-Omethylcytosine
  modified_base 49: mod_base = OTHER; note = 2'-Omethylcytosine
  modified_base 50: mod_base = OTHER; note = 2'-Omethylguanosine
  modified_base 51: mod_base = OTHER; note = 2'-Omethyladenosine
  modified_base 52: mod_base = OTHER; note = 2'-Omethylguanosine
  modified_base 53: mod_base = OTHER; note = Uridine phosphorothiorate
  modified_base 54: mod_base = OTHER; note = Uridine phosphorothiorate
  modified_base 60: mod_base = OTHER; note = 2'-Omethylcytosine
  modified_base 64: mod_base = OTHER; note = 2'-Omethylguanosine
  modified_base 72: mod_base = OTHER; note = 2'-Omethyluridine

SEQ ID NO: 9536 - RNA, 85 nt, synthetic construct; identical to SEQ ID NO: 3297
  source 1..85: mol_type = other RNA
  modified_base 1: mod_base = OTHER; note = 2'-Omethylguanosine
  modified_base 4: mod_base = OTHER; note = 2'-Omethylguanosine
  modified_base 10: mod_base = OTHER; note = 2'-Omethylguanosine
  modified_base 11: mod_base = OTHER; note = 2'-Omethylcytosine
  modified_base 12: mod_base = OTHER; note = 2'-Omethylcytosine
  modified_base 13: mod_base = OTHER; note = 2'-Omethylguanosine
  modified_base 17: mod_base = OTHER; note = 2'-Omethylguanosine
  modified_base 18: mod_base = OTHER; note = 2'-Omethylguanosine
  modified_base 20: mod_base = OTHER; note = 2'-Omethyluridine
  modified_base 25: mod_base = OTHER; note = 2'-Omethylcytosine
  modified_base 29: mod_base = OTHER; note = 2'-Omethylguanosine
  modified_base 30: mod_base = OTHER; note = 2'-Omethylguanosine
  modified_base 58: mod_base = OTHER; note = 2'-Omethylguanosine
  modified_base 59: mod_base = OTHER; note = 2'-Omethylcytosine
  modified_base 61: mod_base = OTHER; note = 2'-Omethylguanosine
  modified_base 65: mod_base = OTHER; note = 2'-Omethylcytosine
  modified_base 68: mod_base = OTHER; note = 2'-Omethyladenosine
  modified_base 70: mod_base = OTHER; note = 2'-Omethylcytosine
  modified_base 74: mod_base = OTHER; note = 2'-Omethylcytosine
  modified_base 75: mod_base = OTHER; note = 2'-Omethyluridine
  modified_base 77: mod_base = OTHER; note = 2'-Omethyladenosine
  modified_base 78: mod_base = OTHER; note = 2'-Omethylcytosine
  modified_base 80: mod_base = OTHER; note = 2'-Omethylguanosine
  modified_base 81: mod_base = OTHER; note = 2'-Omethylcytosine
  modified_base 82: mod_base = OTHER; note = 2'-Omethylguanosine

SEQ ID NO: 9537 - RNA, 75 nt, synthetic construct; identical to SEQ ID NO: 3306
  source 1..75: mol_type = other RNA
  modified_base 1: mod_base = OTHER; note = 2'-Omethylguanosine
  modified_base 13: mod_base = OTHER; note = 2'-Omethylcytosine

SEQ ID NO: 9538 - RNA, 76 nt, synthetic construct; identical to SEQ ID NO: 625
  source 1..76: mol_type = other RNA
  modified_base 1: mod_base = OTHER; note = 2'-Omethylguanosine
  modified_base 2: mod_base = OTHER; note = 2'-Omethylguanosine
  modified_base 6: mod_base = OTHER; note = 2'-fluorocytosine phosphorothiorate
  modified_base 10: mod_base = OTHER; note = 2'-fluoroguanosine
  modified_base 11: mod_base = OTHER; note = 2'-Omethylcytosine
  modified_base 15: mod_base = OTHER; note = 2'-fluoroadenosine
  modified_base 22: mod_base = OTHER; note = Guanosine phosphorothiorate
  modified_base 23: mod_base = OTHER; note = 2'-fluorocytosine
  modified_base 24: mod_base = OTHER; note = 2'-Omethylguanosine
  modified_base 25: mod_base = OTHER; note = 2'-Omethylcytosine phosphorothiorate
  modified_base 27: mod_base = OTHER; note = Uridine phosphorothiorate
  modified_base 28: mod_base = OTHER; note = 2'-Omethyluridine
  modified_base 29: mod_base = OTHER; note = Guanosine phosphorothiorate
  modified_base 32: mod_base = OTHER; note = 2'-fluorocytosine
  modified_base 33: mod_base = OTHER; note = Uridine phosphorothiorate
  modified_base 34: mod_base = OTHER; note = 2'-fluorouridine
  modified_base 38: mod_base = OTHER; note = Adenosine phosphorothiorate
  modified_base 39: mod_base = OTHER; note = 2'-Omethyluridine
  modified_base 40: mod_base = OTHER; note = 2'-Omethyluridine
  modified_base 42: mod_base = OTHER; note = Adenosine phosphorothiorate
  modified_base 44: mod_base = OTHER; note = 2'-fluoroadenosine
  modified_base 45: mod_base = OTHER; note = 2'-fluoroguanosine
  modified_base 47: mod_base = OTHER; note = 2'-Omethyluridine
  modified_base 48: mod_base = OTHER; note = 2'-Omethyluridine
  modified_base 51: mod_base = OTHER; note = 2'-Omethylguanosine
  modified_base 52: mod_base = OTHER; note = Guanosine phosphorothiorate
  modified_base 53: mod_base = OTHER; note = Guanosine phosphorothiorate
  modified_base 60: mod_base = OTHER; note = 2'-Omethyluridine
  modified_base 61: mod_base = OTHER; note = Cytosine phosphorothiorate
  modified_base 62: mod_base = OTHER; note = 2'-Omethylcytosine
  modified_base 64: mod_base = OTHER; note = 2'-fluoroguanosine
  modified_base 69: mod_base = OTHER; note = Adenosine phosphorothiorate
  modified_base 72: mod_base = OTHER; note = 2'-Omethylcytosine
  modified_base 74: mod_base = OTHER; note = 2'-fluorocytosine phosphorothiorate
  modified_base 75: mod_base = OTHER; note = 2'-fluorocytosine
  modified_base 76: mod_base = OTHER; note = 2'-Omethyladenosine

SEQ ID NO: 9539 - DNA, 76 bp, synthetic construct; identical to SEQ ID NO: 1924
  source 1..76: mol_type = other DNA
  misc_feature 1..26: note = RNA
  misc_feature 27..31: note = DNA
  misc_feature 32..38: note = RNA
  misc_feature 39..43: note = DNA
  misc_feature 44..76: note = RNA

SEQ ID NO: 9540 - RNA, 76 nt, synthetic construct; identical to SEQ ID NO: 625
  source 1..76: mol_type = other RNA
  modified_base 1: mod_base = OTHER; note = 2'-Omethylguanosine phosphorothiorate
  modified_base 2: mod_base = OTHER; note = 2'-Omethylguanosine phosphorothiorate
  modified_base 3: mod_base = OTHER; note = 2'-Omethylcytosine
  modified_base 4: mod_base = OTHER; note = 2'-Omethyluridine
  modified_base 5: mod_base = OTHER; note = 2'-Omethylcytosine
  modified_base 6: mod_base = OTHER; note = 2'-Omethylcytosine
  modified_base 10: mod_base = OTHER; note = 2'-Omethylguanosine
  modified_base 11: mod_base = OTHER; note = 2'-Omethylcytosine
  modified_base 12: mod_base = OTHER; note = 2'-Omethylguanosine
  modified_base 13: mod_base = OTHER; note = 2'-Omethylcytosine
  modified_base 14: mod_base = OTHER; note = 2'-Omethyladenosine
  modified_base 15: mod_base = OTHER; note = 2'-fluoroadenosine
  modified_base 16: mod_base = OTHER; note = 2'-Omethyluridine
  modified_base 17: mod_base = OTHER; note = 2'-Omethylguanosine
  modified_base 18: mod_base = OTHER; note = 2'-Omethylguanosine
  modified_base 19: mod_base = OTHER; note = 2'-fluoroadenosine
  modified_base 20: mod_base = OTHER; note = 2'-Omethyluridine
  modified_base 21: mod_base = OTHER; note = 2'-fluoroadenosine
  modified_base 22: mod_base = OTHER; note = 2'-Omethylguanosine
  modified_base 23: mod_base = OTHER; note = 2'-Omethylcytosine
  modified_base 24: mod_base = OTHER; note = 2'-Omethylguanosine
  modified_base 25: mod_base = OTHER; note = 2'-Omethylcytosine
  modified_base 38: mod_base = OTHER; note = Adenosine phosphorothiorate
  modified_base 39: mod_base = OTHER; note = Uridine phosphorothiorate
  modified_base 40: mod_base = OTHER; note = 2'-fluorouridine
  modified_base 43: mod_base = OTHER; note = 2'-Omethyladenosine
  modified_base 44: mod_base = OTHER; note = 2'-Omethyladenosine
  modified_base 45: mod_base = OTHER; note = 2'-Omethylguanosine
  modified_base 46: mod_base = OTHER; note = 2'-fluoroguanosine
  modified_base 48: mod_base = OTHER; note = 2'-fluorouridine
  modified_base 49: mod_base = OTHER; note = 2'-Omethylcytosine
  modified_base 50: mod_base = OTHER; note = 2'-Omethylcytosine
  modified_base 51: mod_base = OTHER; note = 2'-Omethylguanosine
  modified_base 52: mod_base = OTHER; note = 2'-Omethylguanosine
  modified_base 53: mod_base = OTHER; note = 2'-Omethylguanosine
  modified_base 54: mod_base = OTHER; note = 2'-Omethyluridine
  modified_base 61: mod_base = OTHER; note = 2'-Omethylcytosine
  modified_base 62: mod_base = OTHER; note = 2'-Omethylcytosine
  modified_base 63: mod_base = OTHER; note = 2'-fluorocytosine
  modified_base 64: mod_base = OTHER; note = 2'-Omethylguanosine
  modified_base 65: mod_base = OTHER; note = 2'-Omethylguanosine
  modified_base 66: mod_base = OTHER; note = 2'-Omethylcytosine
  modified_base 67: mod_base = OTHER; note = 2'-Omethylguanosine
  modified_base 68: mod_base = OTHER; note = 2'-Omethylguanosine
  modified_base 69: mod_base = OTHER; note = 2'-fluoroadenosine

SEQ ID NO: 9541 - RNA, 76 nt, synthetic construct
  source 1..76: mol_type = other RNA
ggctccgtggcgcaatggatagcgcattggacttcagattcaatggttccgggttcgagtcccggcggagtcgcca

SEQ ID NO: 9542 - RNA, 74 nt, synthetic construct; identical to SEQ ID NO: 3293
  source 1..74: mol_type = other RNA
  modified_base 2: mod_base = OTHER; note = Cytosine phosphorothiorate
  modified_base 8: mod_base = OTHER; note = 2'-fluoroguanosine
  modified_base 10: mod_base = OTHER; note = 2'-Omethylcytosine
  modified_base 21: mod_base = OTHER; note = Cytosine phosphorothiorate
  modified_base 33: mod_base = OTHER; note = 2'-fluorouridine
  modified_base 46: mod_base = OTHER; note = 2'-fluorouridine
  modified_base 73: mod_base = OTHER; note = 2'-Omethylcytosine phosphorothiorate

SEQ ID NO: 9543 - RNA, 76 nt, synthetic construct; identical to SEQ ID NO: 3295
  source 1..76: mol_type = other RNA
  modified_base 1: mod_base = OTHER; note = 2'-Omethylcytosine
  modified_base 7: mod_base = OTHER; note = 2'-fluoroadenosine phosphorothiorate
  modified_base 11: mod_base = OTHER; note = 2'-fluorocytosine phosphorothiorate
  modified_base 20: mod_base = OTHER; note = 2'-fluorouridine phosphorothiorate
  modified_base 29: mod_base = OTHER; note = 2'-Omethylguanosine phosphorothiorate
  modified_base 46: mod_base = OTHER; note = 2'-fluoroguanosine phosphorothiorate
  modified_base 48: mod_base = OTHER; note = 2'-fluorocytosine phosphorothiorate

SEQ ID NO: 9544 - RNA, 85 nt, synthetic construct; identical to SEQ ID NO: 3297
  source 1..85: mol_type = other RNA
  modified_base 70: mod_base = OTHER; note = 2'-Omethylcytosine
  modified_base 71: mod_base = OTHER; note = 2'-Omethylcytosine
  modified_base 72: mod_base = OTHER; note = 2'-Omethyluridine
  modified_base 73: mod_base = OTHER; note = 2'-Omethylguanosine
  modified_base 74: mod_base = OTHER; note = 2'-Omethylcytosine

SEQ ID NO: 9545 - RNA, 76 nt, synthetic construct; identical to SEQ ID NO: 3318
  source 1..76: mol_type = other RNA
  modified_base 1: mod_base = OTHER; note = 2'-Omethylcytosine phosphorothiorate
  modified_base 2: mod_base = OTHER; note = 2'-Omethylcytosine
  modified_base 74: mod_base = OTHER; note = Cytosine phosphorothiorate
  modified_base 75: mod_base = OTHER; note = 2'-Omethylcytosine

SEQ ID NO: 9546 - RNA, 75 nt, synthetic construct; identical to SEQ ID NO: 3311
  source 1..75: mol_type = other RNA
  modified_base 2: mod_base = OTHER; note = 2'-Omethylguanosine
  modified_base 12: mod_base = OTHER; note = 2'-Omethylguanosine
  modified_base 14: mod_base = OTHER; note = 2'-fluoroadenosine
  modified_base 15: mod_base = OTHER; note = 2'-fluoroadenosine phosphorothiorate
  modified_base 17: mod_base = OTHER; note = 2'-fluoroguanosine
  modified_base 20: mod_base = OTHER; note = 2'-fluoroadenosine
  modified_base 21: mod_base = OTHER; note = 2'-fluoroadenosine phosphorothiorate
  modified_base 24: mod_base = OTHER; note = Adenosine phosphorothiorate
  modified_base 25: mod_base = OTHER; note = 2'-fluorocytosine
  modified_base 39: mod_base = OTHER; note = 2'-fluorouridine
  modified_base 42: mod_base = OTHER; note = 2'-Omethyladenosine
  modified_base 51: mod_base = OTHER; note = Adenosine phosphorothiorate
  modified_base 59: mod_base = OTHER; note = 2'-Omethyluridine
  modified_base 66: mod_base = OTHER; note = Guanosine phosphorothiorate

SEQ ID NO: 9547 - RNA, 75 nt, synthetic construct; identical to SEQ ID NO: 3306
  source 1..75: mol_type = other RNA
  modified_base 1: mod_base = OTHER; note = 2'-Omethylguanosine phosphorothiorate
  modified_base 2: mod_base = OTHER; note = 2'-Omethyladenosine phosphorothiorate
  modified_base 3: mod_base = OTHER; note = 2'-Omethylcytosine
  modified_base 4: mod_base = OTHER; note = 2'-Omethylcytosine
  modified_base 5: mod_base = OTHER; note = 2'-Omethyluridine
  modified_base 6: mod_base = OTHER; note = 2'-Omethylcytosine
  modified_base 16: mod_base = OTHER; note = 2'-Omethylcytosine
  modified_base 17: mod_base = OTHER; note = 2'-Omethylguanosine
  modified_base 18: mod_base = OTHER; note = 2'-Omethylguanosine
  modified_base 32: mod_base = OTHER; note = 2'-fluorouridine
  modified_base 34: mod_base = OTHER; note = Uridine phosphorothiorate
  modified_base 36: mod_base = OTHER; note = Guanosine phosphorothiorate
  modified_base 37: mod_base = OTHER; note = Adenosine phosphorothiorate
  modified_base 43: mod_base = OTHER; note = 2'-Omethyladenosine
  modified_base 44: mod_base = OTHER; note = 2'-Omethylguanosine
  modified_base 45: mod_base = OTHER; note = 2'-fluoroguanosine
  modified_base 46: mod_base = OTHER; note = 2'-fluorouridine
  modified_base 47: mod_base = OTHER; note = 2'-fluorouridine
  modified_base 48: mod_base = OTHER; note = 2'-Omethylguanosine
  modified_base 49: mod_base = OTHER; note = 2'-Omethylcytosine
  modified_base 50: mod_base = OTHER; note = 2'-Omethylguanosine
  modified_base 51: mod_base = OTHER; note = 2'-Omethyluridine
  modified_base 52: mod_base = OTHER; note = 2'-Omethylguanosine
  modified_base 53: mod_base = OTHER; note = 2'-Omethyluridine
  modified_base 55: mod_base = OTHER; note = 2'-Omethylcytosine
  modified_base 58: mod_base = OTHER; note = 2'-Omethyladenosine
  modified_base 60: mod_base = OTHER; note = 2'-Omethylcytosine
  modified_base 61: mod_base = OTHER; note = 2'-Omethyladenosine
  modified_base 62: mod_base = OTHER; note = 2'-fluorocytosine
  modified_base 63: mod_base = OTHER; note = 2'-Omethylguanosine
  modified_base 64: mod_base = OTHER; note = 2'-Omethyluridine
  modified_base 65: mod_base = OTHER; note = 2'-Omethylcytosine
  modified_base 66: mod_base = OTHER; note = 2'-Omethylguanosine
  modified_base 67: mod_base = OTHER; note = 2'-Omethylguanosine
  modified_base 72: mod_base = OTHER; note = 2'-Omethyladenosine

SEQ ID NO: 9548 - RNA, 75 nt, synthetic construct; identical to SEQ ID NO: 3336
  source 1..75: mol_type = other RNA
  modified_base 1: mod_base = OTHER; note = 2'-Omethylcytosine
  modified_base 3: mod_base = OTHER; note = 2'-Omethyluridine
  modified_base 12: mod_base = OTHER; note = 2'-fluorocytosine
  modified_base 14: mod_base = OTHER; note = 2'-Omethylguanosine phosphorothiorate
  modified_base 17: mod_base = OTHER; note = 2'-Omethylguanosine
  modified_base 18: mod_base = OTHER; note = 2'-fluoroguanosine
  modified_base 21: mod_base = OTHER; note = Guanosine phosphorothiorate
  modified_base 22: mod_base = OTHER; note = 2'-fluoroadenosine
  modified_base 28: mod_base = OTHER; note = 2'-fluoroadenosine
  modified_base 38: mod_base = OTHER; note = Uridine phosphorothiorate
  modified_base 41: mod_base = OTHER; note = 2'-Omethylguanosine
  modified_base 49: mod_base = OTHER; note = Adenosine phosphorothiorate
  modified_base 60: mod_base = OTHER; note = 2'-fluorocytosine
  modified_base 61: mod_base = OTHER; note = Cytosine phosphorothiorate
  modified_base 72: mod_base = OTHER; note = 2'-fluoroguanosine phosphorothiorate
  modified_base 74: mod_base = OTHER; note = 2'-Omethylcytosine
  modified_base 75: mod_base = OTHER; note = 2'-fluoroadenosine

SEQ ID NO: 9549 - RNA, 76 nt, synthetic construct; identical to SEQ ID NO: 625
  source 1..76: mol_type = other RNA
  modified_base 1: mod_base = OTHER; note = 2'-Omethylguanosine phosphorothiorate
  modified_base 2: mod_base = OTHER; note = 2'-Omethylguanosine
  modified_base 13: mod_base = OTHER; note = 2'-Omethylcytosine
  modified_base 33: mod_base = OTHER; note = 2'-fluorouridine
  modified_base 37: mod_base = OTHER; note = Adenosine phosphorothiorate
  modified_base 52: mod_base = OTHER; note = 2'-Omethylguanosine
  modified_base 62: mod_base = OTHER; note = 2'-Omethylcytosine
  modified_base 73: mod_base = OTHER; note = 2'-Omethylguanosine
  modified_base 75: mod_base = OTHER; note = 2'-fluorocytosine phosphorothiorate

SEQ ID NO: 9550 - RNA, 86 nt, synthetic construct; identical to SEQ ID NO: 3290
  source 1..86: mol_type = other RNA
  modified_base 12: mod_base = OTHER; note = 2'-fluorocytosine

SEQ ID NO: 9551 - RNA, 75 nt, synthetic construct; identical to SEQ ID NO: 3311
  source 1..75: mol_type = other RNA
  modified_base 1: mod_base = OTHER; note = 2'-fluoroguanosine phosphorothiorate
  modified_base 2: mod_base = OTHER; note = 2'-Omethylguanosine phosphorothiorate
  modified_base 13: mod_base = OTHER; note = Uridine phosphorothiorate
  modified_base 19: mod_base = OTHER; note = Uridine phosphorothiorate
  modified_base 20: mod_base = OTHER; note = 2'-fluoroadenosine
  modified_base 21: mod_base = OTHER; note = 2'-fluoroadenosine
  modified_base 40: mod_base = OTHER; note = Cytosine phosphorothiorate
  modified_base 41: mod_base = OTHER; note = 2'-fluorocytosine
  modified_base 58: mod_base = OTHER; note = 2'-fluoroguanosine
  modified_base 59: mod_base = OTHER; note = 2'-fluorouridine
  modified_base 61: mod_base = OTHER; note = Uridine phosphorothiorate
  modified_base 62: mod_base = OTHER; note = Cytosine phosphorothiorate
  modified_base 67: mod_base = OTHER; note = 2'-fluoroguanosine
  modified_base 73: mod_base = OTHER; note = Cytosine phosphorothiorate
  modified_base 74: mod_base = OTHER; note = 2'-Omethylcytosine

SEQ ID NO: 9552 - RNA, 76 nt, synthetic construct; identical to SEQ ID NO: 625
  source 1..76: mol_type = other RNA
  modified_base 1: mod_base = OTHER; note = 2'-Omethylguanosine phosphorothiorate
  modified_base 2: mod_base = OTHER; note = 2'-Omethylguanosine phosphorothiorate
  modified_base 3: mod_base = OTHER; note = 2'-Omethylcytosine
  modified_base 4: mod_base = OTHER; note = 2'-Omethyluridine
  modified_base 5: mod_base = OTHER; note = 2'-Omethylcytosine
  modified_base 6: mod_base = OTHER; note = 2'-Omethylcytosine
  modified_base 10: mod_base = OTHER; note = 2'-Omethylguanosine
  modified_base 11: mod_base = OTHER; note = 2'-Omethylcytosine
  modified_base 12: mod_base = OTHER; note = 2'-Omethylguanosine
  modified_base 13: mod_base = OTHER; note = 2'-Omethylcytosine
  modified_base 14: mod_base = OTHER; note = 2'-Omethyladenosine
  modified_base 15: mod_base = OTHER; note = 2'-fluoroadenosine
  modified_base 16: mod_base = OTHER; note = 2'-Omethyluridine
  modified_base 17: mod_base = OTHER; note = 2'-Omethylguanosine
  modified_base 18: mod_base = OTHER; note = 2'-Omethylguanosine
  modified_base 19: mod_base = OTHER; note = 2'-fluoroadenosine
  modified_base 20: mod_base = OTHER; note = 2'-Omethyluridine
  modified_base 22: mod_base = OTHER; note = 2'-Omethylguanosine
  modified_base 23: mod_base = OTHER; note = 2'-Omethylcytosine
  modified_base 24: mod_base = OTHER; note = 2'-Omethylguanosine
  modified_base 25: mod_base = OTHER; note = 2'-Omethylcytosine
  modified_base 33: mod_base = OTHER; note = 2'-fluorouridine
  modified_base 35: mod_base = OTHER; note = Cytosine phosphorothiorate
  modified_base 37: mod_base = OTHER; note = Adenosine phosphorothiorate
  modified_base 38: mod_base = OTHER; note = Adenosine phosphorothiorate
  modified_base 40: mod_base = OTHER; note = 2'-fluorouridine
  modified_base 41: mod_base = OTHER; note = 2'-fluorocytosine
  modified_base 42: mod_base = OTHER; note = 2'-fluoroadenosine
  modified_base 43: mod_base = OTHER; note = 2'-fluoroadenosine
  modified_base 44: mod_base = OTHER; note = 2'-Omethyladenosine
  modified_base 45: mod_base = OTHER; note = 2'-Omethylguanosine
  modified_base 46: mod_base = OTHER; note = 2'-fluoroguanosine
  modified_base 47: mod_base = OTHER; note = 2'-fluorouridine
  modified_base 48: mod_base = OTHER; note = 2'-fluorouridine
  modified_base 49: mod_base = OTHER; note = 2'-Omethylcytosine
  modified_base 50: mod_base = OTHER; note = 2'-Omethylcytosine
  modified_base 51: mod_base = OTHER; note = 2'-Omethylguanosine
  modified_base 52: mod_base = OTHER; note = 2'-Omethylguanosine
  modified_base 53: mod_base = OTHER; note = 2'-Omethylguanosine
  modified_base 56: mod_base = OTHER; note = 2'-Omethylcytosine
  modified_base 59: mod_base = OTHER; note = 2'-Omethylguanosine
  modified_base 61: mod_base = OTHER; note = 2'-Omethylcytosine
  modified_base 62: mod_base = OTHER; note = 2'-Omethylcytosine
  modified_base 63: mod_base = OTHER; note = 2'-fluorocytosine
  modified_base 64: mod_base = OTHER; note = 2'-Omethylguanosine
  modified_base 65: mod_base = OTHER; note = 2'-Omethylguanosine
  modified_base 66: mod_base = OTHER; note = 2'-Omethylcytosine
  modified_base 67: mod_base = OTHER; note = 2'-Omethylguanosine
  modified_base 68: mod_base = OTHER; note = 2'-Omethylguanosine
  modified_base 73: mod_base = OTHER; note = 2'-Omethylguanosine

SEQ ID NO: 9553 - RNA, 74 nt, synthetic construct; identical to SEQ ID NO: 3293
  source 1..74: mol_type = other RNA
  modified_base 1: mod_base = OTHER; note = 2'-fluoroadenosine
  modified_base 4: mod_base = OTHER; note = Uridine phosphorothiorate
  modified_base 6: mod_base = OTHER; note = 2'-fluoroguanosine
  modified_base 10: mod_base = OTHER; note = 2'-Omethylcytosine
  modified_base 22: mod_base = OTHER; note = 2'-fluoroguanosine phosphorothiorate
  modified_base 35: mod_base = OTHER; note = 2'-fluoroguanosine phosphorothiorate
  modified_base 43: mod_base = OTHER; note = Guanosine phosphorothiorate
  modified_base 48: mod_base = OTHER; note = 2'-fluorocytosine phosphorothiorate
  modified_base 50: mod_base = OTHER; note = Uridine phosphorothiorate
  modified_base 62: mod_base = OTHER; note = Guanosine phosphorothiorate
  modified_base 64: mod_base = OTHER; note = Cytosine phosphorothiorate
  modified_base 73: mod_base = OTHER; note = 2'-Omethylcytosine phosphorothiorate

SEQ ID NO: 9554 - RNA, 83 nt, synthetic construct; identical to SEQ ID NO: 6504
  source 1..83: mol_type = other RNA
  modified_base 1: mod_base = OTHER; note = 2'-Omethyladenosine
  modified_base 2: mod_base = OTHER; note = 2'-Omethylcytosine
  modified_base 3: mod_base = OTHER; note = 2'-Omethylcytosine
  modified_base 4: mod_base = OTHER; note = 2'-Omethyladenosine
  modified_base 5: mod_base = OTHER; note = 2'-Omethylguanosine
  modified_base 6: mod_base = OTHER; note = 2'-Omethylguanosine

SEQ ID NO: 9555 - RNA, 86 nt, synthetic construct; identical to SEQ ID NO: 3290
  source 1..86: mol_type = other RNA
  modified_base 36: mod_base = OTHER; note = Adenosine phosphorothiorate

SEQ ID NO: 9556 - RNA, 76 nt, synthetic construct; identical to SEQ ID NO: 3318
  source 1..76: mol_type = other RNA
  modified_base 1: mod_base = OTHER; note = 2'-Omethylcytosine phosphorothiorate
  modified_base 2: mod_base = OTHER; note = 2'-Omethylcytosine phosphorothiorate
  modified_base 75: mod_base = OTHER; note = Cytosine phosphorothiorate
  modified_base 76: mod_base = OTHER; note = 2'-Omethyladenosine

SEQ ID NO: 9557 - RNA, 76 nt, synthetic construct; identical to SEQ ID NO: 3329
  source 1..76: mol_type = other RNA
  modified_base 1: mod_base = OTHER; note = 2'-Omethylguanosine
  modified_base 17: mod_base = OTHER; note = 2'-Omethylguanosine
  modified_base 18: mod_base = OTHER; note = 2'-Omethylguanosine
  modified_base 50: mod_base = OTHER; note = 2'-Omethylcytosine
  modified_base 52: mod_base = OTHER; note = 2'-Omethylguanosine
  modified_base 73: mod_base = OTHER; note = 2'-Omethylguanosine

SEQ ID NO: 9558 - RNA, 76 nt, synthetic construct; identical to SEQ ID NO: 3795
  source 1..76: mol_type = other RNA
  modified_base 1: mod_base = OTHER; note = 2'-Omethylguanosine
  modified_base 10: mod_base = OTHER; note = 2'-Omethylguanosine
  modified_base 13: mod_base = OTHER; note = 2'-Omethyluridine
  modified_base 17: mod_base = OTHER; note = Guanosine phosphorothiorate
  modified_base 18: mod_base = OTHER; note = 2'-Omethylguanosine
  modified_base 19: mod_base = OTHER; note = Adenosine phosphorothiorate
  modified_base 20: mod_base = OTHER; note = 2'-Omethyluridine
  modified_base 25: mod_base = OTHER; note = 2'-Omethylcytosine
  modified_base 29: mod_base = OTHER; note = 2'-Omethylguanosine
  modified_base 33: mod_base = OTHER; note = 2'-fluorouridine
  modified_base 35: mod_base = OTHER; note = Cytosine phosphorothiorate
  modified_base 37: mod_base = OTHER; note = Adenosine phosphorothiorate
  modified_base 38: mod_base = OTHER; note = Adenosine phosphorothiorate
  modified_base 41: mod_base = OTHER; note = 2'-fluorocytosine phosphorothiorate
  modified_base 43: mod_base = OTHER; note = 2'-Omethylguanosine
  modified_base 44: mod_base = OTHER; note = 2'-fluoroguanosine
  modified_base 46: mod_base = OTHER; note = Adenosine phosphorothiorate
  modified_base 50: mod_base = OTHER; note = 2'-Omethylcytosine
  modified_base 52: mod_base = OTHER; note = 2'-Omethylguanosine
  modified_base 54: mod_base = OTHER; note = Uridine phosphorothiorate
  modified_base 55: mod_base = OTHER; note = Uridine phosphorothiorate
  modified_base 56: mod_base = OTHER; note = 2'-Omethylcytosine
  modified_base 57: mod_base = OTHER; note = Guanosine phosphorothiorate
  modified_base 62: mod_base = OTHER; note = 2'-Omethylcytosine
  modified_base 63: mod_base = OTHER; note = 2'-fluorocytosine
  modified_base 65: mod_base = OTHER; note = 2'-Omethyluridine
  modified_base 71: mod_base = OTHER; note = 2'-Omethylguanosine
  modified_base 73: mod_base = OTHER; note = 2'-Omethylguanosine

SEQ ID NO: 9559 - RNA, 76 nt, synthetic construct; identical to SEQ ID NO: 3318
  source 1..76: mol_type = other RNA
  modified_base 1: mod_base = OTHER; note = 2'-Omethylcytosine
  modified_base 2: mod_base = OTHER; note = 2'-Omethylcytosine
  modified_base 3: mod_base = OTHER; note = 2'-Omethyluridine
  modified_base 4: mod_base = OTHER; note = 2'-Omethyluridine

SEQ ID NO: 9560 - RNA, 76 nt, synthetic construct; identical to SEQ ID NO: 625
  source 1..76: mol_type = other RNA
  modified_base 1: mod_base = OTHER; note = 2'-Omethylguanosine
  modified_base 2: mod_base = OTHER; note = 2'-Omethylguanosine
  modified_base 3: mod_base = OTHER; note = 2'-Omethylcytosine
  modified_base 4: mod_base = OTHER; note = 2'-Omethyluridine
  modified_base 5: mod_base = OTHER; note = 2'-Omethylcytosine
  modified_base 6: mod_base = OTHER; note = 2'-Omethylcytosine
  modified_base 10: mod_base = OTHER; note = 2'-Omethylguanosine
  modified_base 12: mod_base = OTHER; note = 2'-Omethylguanosine
  modified_base 13: mod_base = OTHER; note = 2'-Omethylcytosine
  modified_base 14: mod_base = OTHER; note = 2'-Omethyladenosine
  modified_base 15: mod_base = OTHER; note = 2'-Omethyladenosine
  modified_base 16: mod_base = OTHER; note = 2'-Omethyluridine
  modified_base 17: mod_base = OTHER; note = 2'-Omethylguanosine
  modified_base 18: mod_base = OTHER; note = 2'-fluoroguanosine phosphorothiorate
  modified_base 19: mod_base = OTHER; note = 2'-fluoroadenosine phosphorothiorate
  modified_base 20: mod_base = OTHER; note = Uridine phosphorothiorate
  modified_base 21: mod_base = OTHER; note = 2'-fluoroadenosine phosphorothiorate
  modified_base 22: mod_base = OTHER; note = 2'-Omethylguanosine
  modified_base 23: mod_base = OTHER; note = 2'-Omethylcytosine
  modified_base 24: mod_base = OTHER; note = 2'-Omethylguanosine phosphorothiorate
  modified_base 25: mod_base = OTHER; note = 2'-Omethylcytosine phosphorothiorate
  modified_base 26: mod_base = OTHER; note = Adenosine phosphorothiorate
  modified_base 28: mod_base = OTHER; note = 2'-Omethyluridine phosphorothiorate
  modified_base 30: mod_base = OTHER; note = 2'-Omethylguanosine
  modified_base 31: mod_base = OTHER; note = 2'-Omethyladenosine phosphorothiorate
  modified_base 33: mod_base = OTHER; note = 2'-fluorouridine
  modified_base 34: mod_base = OTHER; note = 2'-Omethyluridine phosphorothiorate
  modified_base 35: mod_base = OTHER; note = Cytosine phosphorothiorate
  modified_base 37: mod_base = OTHER; note = Adenosine phosphorothiorate
  modified_base 38: mod_base = OTHER; note = Adenosine phosphorothiorate
  modified_base 40: mod_base = OTHER; note = 2'-Omethyluridine
  modified_base 41: mod_base = OTHER; note = 2'-fluorocytosine
  modified_base 43: mod_base = OTHER; note = 2'-Omethyladenosine
  modified_base 49: mod_base = OTHER; note = 2'-Omethylcytosine
  modified_base 50: mod_base = OTHER; note = 2'-Omethylcytosine
  modified_base 51: mod_base = OTHER; note = 2'-Omethylguanosine
  modified_base 52: mod_base = OTHER; note = 2'-Omethylguanosine
  modified_base 53: mod_base = OTHER; note = 2'-Omethylguanosine phosphorothiorate
  modified_base 55: mod_base = OTHER; note = Uridine phosphorothiorate
  modified_base 57: mod_base = OTHER; note = 2'-Omethylguanosine
  modified_base 59: mod_base = OTHER; note = 2'-Omethylguanosine
  modified_base 61: mod_base = OTHER; note = 2'-Omethylcytosine
  modified_base 62: mod_base = OTHER; note = 2'-Omethylcytosine
  modified_base 63: mod_base = OTHER; note = 2'-fluorocytosine
  modified_base 64: mod_base = OTHER; note = 2'-Omethylguanosine phosphorothiorate
  modified_base 65: mod_base = OTHER; note = 2'-Omethylguanosine phosphorothiorate
  modified_base 66: mod_base = OTHER; note = 2'-fluorocytosine
  modified_base 67: mod_base = OTHER; note = 2'-fluoroguanosine
  modified_base 68: mod_base = OTHER; note = 2'-Omethylguanosine
  modified_base 69: mod_base = OTHER; note = 2'-fluoroadenosine
  modified_base 72: mod_base = OTHER; note = 2'-fluorocytosine phosphorothiorate
  modified_base 73: mod_base = OTHER; note = Guanosine phosphorothiorate
  modified_base 74: mod_base = OTHER; note = 2'-fluorocytosine phosphorothiorate
  modified_base 75: mod_base = OTHER; note = 2'-fluorocytosine phosphorothiorate
  modified_base 76: mod_base = OTHER; note = 2'-fluoroadenosine

SEQ ID NO: 9561 - RNA, 75 nt, synthetic construct; identical to SEQ ID NO: 3306
  source 1..75: mol_type = other RNA
  modified_base 1: mod_base = OTHER; note = 2'-Omethylguanosine
  modified_base 17: mod_base = OTHER; note = 2'-Omethylguanosine

SEQ ID NO: 9562 - RNA, 76 nt, synthetic construct; identical to SEQ ID NO: 625
  source 1..76: mol_type = other RNA
  modified_base 1: mod_base = OTHER; note = 2'-Omethylguanosine
  modified_base 17: mod_base = OTHER; note = 2'-Omethylguanosine
  modified_base 33: mod_base = OTHER; note = 2'-O-(2-Methoxyethyl) thymine

SEQ ID NO: 9563 - RNA, 76 nt, synthetic construct; identical to SEQ ID NO: 625
  source 1..76: mol_type = other RNA
  modified_base 40: mod_base = OTHER; note = 2'-fluorouridine
  modified_base 41: mod_base = OTHER; note = 2'-fluorocytosine
  modified_base 42: mod_base = OTHER; note = 2'-fluoroadenosine
  modified_base 43: mod_base = OTHER; note = 2'-fluoroadenosine
  modified_base 44: mod_base = OTHER; note = 2'-Omethyladenosine
  modified_base 45: mod_base = OTHER; note = 2'-Omethylguanosine
  modified_base 46: mod_base = OTHER; note = 2'-Omethylguanosine
  modified_base 49: mod_base = OTHER; note = 2'-Omethylcytosine
  modified_base 50: mod_base = OTHER; note = 2'-Omethylcytosine
  modified_base 51: mod_base = OTHER; note = 2'-Omethylguanosine
  modified_base 52: mod_base = OTHER; note = 2'-Omethylguanosine
  modified_base 53: mod_base = OTHER; note = 2'-Omethylguanosine
  modified_base 54: mod_base = OTHER; note = Uridine phosphorothiorate
  modified_base 55: mod_base = OTHER; note = Uridine phosphorothiorate
  modified_base 56: mod_base = OTHER; note = Cytosine phosphorothiorate
  modified_base 57: mod_base = OTHER; note = Guanosine phosphorothiorate
  modified_base 61: mod_base = OTHER; note = 2'-Omethylcytosine
  modified_base 62: mod_base = OTHER; note = 2'-Omethylcytosine
  modified_base 63: mod_base = OTHER; note = 2'-Omethylcytosine
  modified_base 64: mod_base = OTHER; note = 2'-Omethylguanosine
  modified_base 65: mod_base = OTHER; note = 2'-Omethylguanosine
  modified_base 66: mod_base = OTHER; note = 2'-Omethylcytosine
  modified_base 67: mod_base = OTHER; note = 2'-Omethylguanosine
  modified_base 68: mod_base = OTHER; note = 2'-Omethylguanosine
  modified_base 69: mod_base = OTHER; note = 2'-Omethyladenosine

SEQ ID NO: 9564 - RNA, 76 nt, synthetic construct; identical to SEQ ID NO: 625
  source 1..76: mol_type = other RNA
  modified_base 1: mod_base = OTHER; note = 2'-Omethylguanosine phosphorothiorate
  modified_base 2: mod_base = OTHER; note = 2'-Omethylguanosine phosphorothiorate
  modified_base 3: mod_base = OTHER; note = 2'-Omethylcytosine
  modified_base 4: mod_base = OTHER; note = 2'-Omethyluridine
  modified_base 5: mod_base = OTHER; note = 2'-Omethylcytosine
  modified_base 6: mod_base = OTHER; note = 2'-Omethylcytosine
  modified_base 10: mod_base = OTHER; note = 2'-Omethylguanosine
  modified_base 11: mod_base = OTHER; note = 2'-Omethylcytosine
  modified_base 12: mod_base = OTHER; note = 2'-Omethylguanosine
  modified_base 13: mod_base = OTHER; note = 2'-Omethylcytosine
  modified_base 16: mod_base = OTHER; note = 2'-Omethyluridine
  modified_base 17: mod_base = OTHER; note = 2'-Omethylguanosine
  modified_base 18: mod_base = OTHER; note = 2'-Omethylguanosine
  modified_base 20: mod_base = OTHER; note = 2'-Omethyluridine
  modified_base 25: mod_base = OTHER; note = 2'-Omethylcytosine
  modified_base 33: mod_base = OTHER; note = 2'-fluorouridine
  modified_base 35: mod_base = OTHER; note = Cytosine phosphorothiorate
  modified_base 37: mod_base = OTHER; note = Adenosine phosphorothiorate
  modified_base 38: mod_base = OTHER; note = Adenosine phosphorothiorate
  modified_base 41: mod_base = OTHER; note = 2'-fluorocytosine
  modified_base 42: mod_base = OTHER; note = 2'-Omethyladenosine
  modified_base 43: mod_base = OTHER; note = 2'-Omethyladenosine
  modified_base 44: mod_base = OTHER; note = 2'-fluoroadenosine
  modified_base 49: mod_base = OTHER; note = 2'-Omethylcytosine
  modified_base 50: mod_base = OTHER; note = 2'-Omethylcytosine
  modified_base 52: mod_base = OTHER; note = 2'-Omethylguanosine
  modified_base 54: mod_base = OTHER; note = 2'-Omethyluridine
  modified_base 55: mod_base = OTHER; note = Uridine phosphorothiorate
  modified_base 56: mod_base = OTHER; note = 2'-Omethylcytosine
  modified_base 57: mod_base = OTHER; note = 2'-fluoroguanosine
  modified_base 59: mod_base = OTHER; note = 2'-Omethylguanosine
  modified_base 61: mod_base = OTHER; note = 2'-Omethylcytosine
  modified_base 65: mod_base = OTHER; note = 2'-Omethylguanosine
  modified_base 75: mod_base = OTHER; note = Cytosine phosphorothiorate
  modified_base 76: mod_base = OTHER; note = 2'-Omethyladenosine

SEQ ID NO: 9565 - RNA, 85 nt, synthetic construct; identical to SEQ ID NO: 3317
  source 1..85: mol_type = other RNA
  modified_base 1: mod_base = OTHER; note = 2'-Omethylguanosine phosphorothiorate
  modified_base 3: mod_base = OTHER; note = 2'-Omethyluridine phosphorothiorate
  modified_base 4: mod_base = OTHER; note = 2'-Omethylguanosine phosphorothiorate
  modified_base 16: mod_base = OTHER; note = 2'-Omethyluridine
  modified_base 17: mod_base = OTHER; note = 2'-Omethylguanosine phosphorothiorate
  modified_base 27: mod_base = OTHER; note = 2'-fluorouridine
  modified_base 34: mod_base = OTHER; note = 2'-Omethylcytosine
  modified_base 36: mod_base = OTHER; note = Adenosine phosphorothiorate
  modified_base 41: mod_base = OTHER; note = 2'-fluorocytosine
  modified_base 45: mod_base = OTHER; note = 2'-Omethylguanosine
  modified_base 47: mod_base = OTHER; note = Guanosine phosphorothiorate
  modified_base 53: mod_base = OTHER; note = Cytosine phosphorothiorate
  modified_base 55: mod_base = OTHER; note = 2'-Omethylcytosine
  modified_base 59: mod_base = OTHER; note = Cytosine phosphorothiorate
  modified_base 77: mod_base = OTHER; note = 2'-fluoroadenosine
  modified_base 79: mod_base = OTHER; note = 2'-fluoroadenosine phosphorothiorate

SEQ ID NO: 9566 - RNA, 76 nt, synthetic construct; identical to SEQ ID NO: 625
  source 1..76: mol_type = other RNA
  modified_base 2: mod_base = OTHER; note = Guanosine phosphorothiorate
  modified_base 3: mod_base = OTHER; note = 2'-Omethylcytosine phosphorothiorate
  modified_base 4: mod_base = OTHER; note = 2'-fluorouridine phosphorothiorate
  modified_base 5: mod_base = OTHER; note = 2'-fluorocytosine phosphorothiorate
  modified_base 10: mod_base = OTHER; note = 2'-fluoroguanosine
  modified_base 11: mod_base = OTHER; note = 2'-fluorocytosine
  modified_base 12: mod_base = OTHER; note = 2'-Omethylguanosine
  modified_base 14: mod_base = OTHER; note = 2'-fluoroadenosine
  modified_base 16: mod_base = OTHER; note = Uridine phosphorothiorate
  modified_base 18: mod_base = OTHER; note = 2'-Omethylguanosine
  modified_base 26: mod_base = OTHER; note = Adenosine phosphorothiorate
  modified_base 27: mod_base = OTHER; note = Uridine phosphorothiorate
  modified_base 28: mod_base = OTHER; note = 2'-fluorouridine
  modified_base 30: mod_base = OTHER; note = 2'-fluoroguanosine
  modified_base 32: mod_base = OTHER; note = 2'-fluorocytosine
  modified_base 40: mod_base = OTHER; note = 2'-Omethyluridine
  modified_base 41: mod_base = OTHER; note = 2'-fluorocytosine
  modified_base 42: mod_base = OTHER; note = Adenosine phosphorothiorate
  modified_base 43: mod_base = OTHER; note = 2'-Omethyladenosine
  modified_base 45: mod_base = OTHER; note = 2'-Omethylguanosine
  modified_base 47: mod_base = OTHER; note = Uridine phosphorothiorate
  modified_base 48: mod_base = OTHER; note = 2'-fluorouridine phosphorothiorate
  modified_base 50: mod_base = OTHER; note = 2'-fluorocytosine
  modified_base 53: mod_base = OTHER; note = 2'-fluoroguanosine
  modified_base 54: mod_base = OTHER; note = 2'-Omethyluridine
  modified_base 55: mod_base = OTHER; note = Uridine phosphorothiorate
  modified_base 57: mod_base = OTHER; note = 2'-fluoroguanosine
  modified_base 59: mod_base = OTHER; note = 2'-fluoroguanosine
  modified_base 60: mod_base = OTHER; note = 2'-fluorouridine
  modified_base 61: mod_base = OTHER; note = 2'-fluorocytosine phosphorothiorate
  modified_base 62: mod_base = OTHER; note = 2'-fluorocytosine phosphorothiorate
  modified_base 63: mod_base = OTHER; note = 2'-Omethylcytosine
  modified_base 70: mod_base = OTHER; note = 2'-Omethylguanosine
  modified_base 71: mod_base = OTHER; note = Uridine phosphorothiorate
  modified_base 72: mod_base = OTHER; note = 2'-Omethylcytosine

SEQ ID NO: 9567 - RNA, 75 nt, synthetic construct
  source 1..75: mol_type = other RNA
  modified_base 1: mod_base = OTHER; note = 2'-Omethylcytosine
  modified_base 18: mod_base = OTHER; note = 2'-Omethylguanosine
  modified_base 19: mod_base = OTHER; note = 2'-Omethylguanosine
  modified_base 50: mod_base = OTHER; note = 2'-Omethylcytosine
  modified_base 52: mod_base = OTHER; note = 2'-Omethylguanosine
  modified_base 73: mod_base = OTHER; note = 2'-Omethyladenosine
ccttcgatagctcagttggtagagcggaggactctagatccttaggtcgctggttcgaatccggctcgaaggacc

SEQ ID NO: 9568 - RNA, 76 nt, synthetic construct; identical to SEQ ID NO: 625
  source 1..76: mol_type = other RNA
  modified_base 1: mod_base = OTHER; note = 2'-Omethylguanosine phosphorothiorate
  modified_base 2: mod_base = OTHER; note = 2'-Omethylguanosine
  modified_base 3: mod_base = OTHER; note = 2'-Omethylcytosine
  modified_base 4: mod_base = OTHER; note = 2'-Omethyluridine
  modified_base 5: mod_base = OTHER; note = 2'-Omethylcytosine
  modified_base 6: mod_base = OTHER; note = 2'-Omethylcytosine
  modified_base 10: mod_base = OTHER; note = 2'-Omethylguanosine
  modified_base 11: mod_base = OTHER; note = 2'-Omethylcytosine
  modified_base 12: mod_base = OTHER; note = 2'-Omethylguanosine
  modified_base 13: mod_base = OTHER; note = 2'-Omethylcytosine
  modified_base 14: mod_base = OTHER; note = 2'-Omethyladenosine
  modified_base 15: mod_base = OTHER; note = 2'-fluoroadenosine
  modified_base 16: mod_base = OTHER; note = 2'-Omethyluridine
  modified_base 17: mod_base = OTHER; note = 2'-Omethylguanosine
  modified_base 18: mod_base = OTHER; note = 2'-Omethylguanosine
  modified_base 19: mod_base = OTHER; note = 2'-fluoroadenosine
  modified_base 20: mod_base = OTHER; note = 2'-Omethyluridine
  modified_base 21: mod_base = OTHER; note = 2'-fluoroadenosine
  modified_base 22: mod_base = OTHER; note = 2'-Omethylguanosine
  modified_base 23: mod_base = OTHER; note = 2'-Omethylcytosine
  modified_base 24: mod_base = OTHER; note = 2'-Omethylguanosine
  modified_base 25: mod_base = OTHER; note = 2'-Omethylcytosine
  modified_base 29: mod_base = OTHER; note = 2'-Omethylguanosine
  modified_base 33: mod_base = OTHER; note = 2'-fluorouridine
  modified_base 35: mod_base = OTHER; note = Cytosine phosphorothiorate
  modified_base 37: mod_base = OTHER; note = Adenosine phosphorothiorate
  modified_base 38: mod_base = OTHER; note = Adenosine phosphorothiorate
  modified_base 41: mod_base = OTHER; note = 2'-fluorocytosine phosphorothiorate
  modified_base 43: mod_base = OTHER; note = 2'-Omethyladenosine
  modified_base 44: mod_base = OTHER; note = 2'-fluoroadenosine
  modified_base 46: mod_base = OTHER; note = Guanosine phosphorothiorate
  modified_base 49: mod_base = OTHER; note = 2'-Omethylcytosine
  modified_base 50: mod_base = OTHER; note = 2'-Omethylcytosine
  modified_base 51: mod_base = OTHER; note = 2'-Omethylguanosine
  modified_base 52: mod_base = OTHER; note = 2'-Omethylguanosine
  modified_base 53: mod_base = OTHER; note = 2'-Omethylguanosine
  modified_base 54: mod_base = OTHER; note = Uridine phosphorothiorate
  modified_base 55: mod_base = OTHER; note = Uridine phosphorothiorate
  modified_base 56: mod_base = OTHER; note = 2'-Omethylcytosine
  modified_base 57: mod_base = OTHER; note = 2'-Omethylguanosine
  modified_base 59: mod_base = OTHER; note = 2'-Omethylguanosine
  modified_base 61: mod_base = OTHER; note = 2'-Omethylcytosine
  modified_base 62: mod_base = OTHER; note = 2'-Omethylcytosine
  modified_base 63: mod_base = OTHER; note = 2'-fluorocytosine
  modified_base 64: mod_base = OTHER; note = 2'-Omethylguanosine
  modified_base 65: mod_base = OTHER; note = 2'-Omethylguanosine
  modified_base 66: mod_base = OTHER; note = 2'-Omethylcytosine
  modified_base 67: mod_base = OTHER; note = 2'-Omethylguanosine
  modified_base 68: mod_base = OTHER; note = 2'-Omethylguanosine
  modified_base 69: mod_base = OTHER; note = 2'-Omethyladenosine
  modified_base 70: mod_base = OTHER; note = 2'-fluoroguanosine
  modified_base 71: mod_base = OTHER; note = 2'-Omethyluridine
  modified_base 73: mod_base = OTHER; note = 2'-Omethylguanosine
  modified_base 74: mod_base = OTHER; note = Cytosine phosphorothiorate
  modified_base 75: mod_base = OTHER; note = 2'-Omethylcytosine

SEQ ID NO: 9569 - RNA, 76 nt, synthetic construct; identical to SEQ ID NO: 625
  source 1..76: mol_type = other RNA
  modified_base 1: mod_base = OTHER; note = 2'-fluoroguanosine phosphorothiorate
  modified_base 2: mod_base = OTHER; note = Guanosine phosphorothiorate
  modified_base 3: mod_base = OTHER; note = 2'-Omethylcytosine
  modified_base 5: mod_base = OTHER; note = 2'-fluorocytosine
  modified_base 14: mod_base = OTHER; note = 2'-fluoroadenosine
  modified_base 15: mod_base = OTHER; note = 2'-fluoroadenosine
  modified_base 16: mod_base = OTHER; note = 2'-Omethyluridine
  modified_base 18: mod_base = OTHER; note = 2'-Omethylguanosine
  modified_base 22: mod_base = OTHER; note = 2'-Omethylguanosine
  modified_base 23: mod_base = OTHER; note = 2'-Omethylcytosine
  modified_base 27: mod_base = OTHER; note = 2'-fluorouridine
  modified_base 30: mod_base = OTHER; note = 2'-Omethylguanosine
  modified_base 32: mod_base = OTHER; note = 2'-fluorocytosine
  modified_base 33: mod_base = OTHER; note = 2'-fluorouridine
  modified_base 38: mod_base = OTHER; note = 2'-fluoroadenosine
  modified_base 43: mod_base = OTHER; note = 2'-Omethyladenosine
  modified_base 45: mod_base = OTHER; note = 2'-fluoroguanosine
  modified_base 47: mod_base = OTHER; note = 2'-Omethyluridine
  modified_base 48: mod_base = OTHER; note = 2'-Omethyluridine
  modified_base 49: mod_base = OTHER; note = 2'-Omethylcytosine phosphorothiorate
  modified_base 50: mod_base = OTHER; note = 2'-fluorocytosine phosphorothiorate
  modified_base 51: mod_base = OTHER; note = 2'-Omethylguanosine
  modified_base 52: mod_base = OTHER; note = Guanosine phosphorothiorate
  modified_base 53: mod_base = OTHER; note = 2'-Omethylguanosine
  modified_base 56: mod_base = OTHER; note = Cytosine phosphorothiorate
  modified_base 58: mod_base = OTHER; note = Adenosine phosphorothiorate
  modified_base 59: mod_base = OTHER; note = 2'-fluoroguanosine
  modified_base 60: mod_base = OTHER; note = 2'-fluorouridine
  modified_base 63: mod_base = OTHER; note = 2'-fluorocytosine
  modified_base 64: mod_base = OTHER; note = Guanosine phosphorothiorate
  modified_base 65: mod_base = OTHER; note = 2'-fluoroguanosine phosphorothiorate
  modified_base 69: mod_base = OTHER; note = Adenosine phosphorothiorate
  modified_base 70: mod_base = OTHER; note = 2'-fluoroguanosine
  modified_base 71: mod_base = OTHER; note = 2'-fluorouridine
  modified_base 72: mod_base = OTHER; note = 2'-fluorocytosine
  modified_base 75: mod_base = OTHER; note = 2'-fluorocytosine
  modified_base 76: mod_base = OTHER; note = 2'-fluoroadenosine

SEQ ID NO: 9570 - RNA, 76 nt, synthetic construct; identical to SEQ ID NO: 3318
  source 1..76: mol_type = other RNA
  modified_base 1: mod_base = OTHER; note = 2'-Omethylcytosine phosphorothiorate
  modified_base 2: mod_base = OTHER; note = 2'-Omethylcytosine phosphorothiorate
  modified_base 26: mod_base = OTHER; note = 2'-Omethylguanosine
  modified_base 42: mod_base = OTHER; note = Uridine phosphorothiorate
  modified_base 43: mod_base = OTHER; note = 2'-fluorouridine
  modified_base 66: mod_base = OTHER; note = Uridine phosphorothiorate
  modified_base 67: mod_base = OTHER; note = 2'-fluorocytosine
  modified_base 70: mod_base = OTHER; note = 2'-fluoroadenosine
  modified_base 74: mod_base = OTHER; note = Cytosine phosphorothiorate
  modified_base 75: mod_base = OTHER; note = 2'-Omethylcytosine phosphorothiorate
  modified_base 76: mod_base = OTHER; note = 2'-Omethyladenosine

SEQ ID NO: 9571 - RNA, 76 nt, synthetic construct; identical to SEQ ID NO: 625
  source 1..76: mol_type = other RNA
  modified_base 1: mod_base = OTHER; note = 2'-Omethylguanosine
  modified_base 10: mod_base = OTHER; note = 2'-Omethylguanosine
  modified_base 13: mod_base = OTHER; note = 2'-Omethylcytosine
  modified_base 17: mod_base = OTHER; note = Guanosine phosphorothiorate
  modified_base 18: mod_base = OTHER; note = 2'-Omethylguanosine
  modified_base 19: mod_base = OTHER; note = Adenosine phosphorothiorate
  modified_base 20: mod_base = OTHER; note = 2'-Omethyluridine
  modified_base 25: mod_base = OTHER; note = 2'-Omethylcytosine
  modified_base 29: mod_base = OTHER; note = 2'-Omethylguanosine
  modified_base 33: mod_base = OTHER; note = 2'-fluorouridine
  modified_base 35: mod_base = OTHER; note = Cytosine phosphorothiorate
  modified_base 37: mod_base = OTHER; note = Adenosine phosphorothiorate
  modified_base 38: mod_base = OTHER; note = Adenosine phosphorothiorate
  modified_base 41: mod_base = OTHER; note = 2'-fluorocytosine
  modified_base 43: mod_base = OTHER; note = 2'-Omethyladenosine
  modified_base 44: mod_base = OTHER; note = 2'-fluoroadenosine
  modified_base 46: mod_base = OTHER; note = Guanosine phosphorothiorate
  modified_base 50: mod_base = OTHER; note = 2'-Omethylcytosine
  modified_base 52: mod_base = OTHER; note = 2'-Omethylguanosine
  modified_base 54: mod_base = OTHER; note = Uridine phosphorothiorate
  modified_base 55: mod_base = OTHER; note = Uridine phosphorothiorate
  modified_base 56: mod_base = OTHER; note = 2'-Omethylcytosine
  modified_base 62: mod_base = OTHER; note = 2'-Omethylcytosine
  modified_base 63: mod_base = OTHER; note = 2'-fluorocytosine
  modified_base 65: mod_base = OTHER; note = 2'-Omethylguanosine
  modified_base 71: mod_base = OTHER; note = 2'-Omethyluridine
  modified_base 73: mod_base = OTHER; note = 2'-Omethylguanosine

SEQ ID NO: 9572 - RNA, 76 nt, synthetic construct; identical to SEQ ID NO: 3295
  source 1..76: mol_type = other RNA
  modified_base 1: mod_base = OTHER; note = 2'-Omethylcytosine
  modified_base 2: mod_base = OTHER; note = 2'-Omethylcytosine
  modified_base 3: mod_base = OTHER; note = 2'-fluorouridine phosphorothiorate
  modified_base 4: mod_base = OTHER; note = 2'-Omethyluridine phosphorothiorate
  modified_base 13: mod_base = OTHER; note = 2'-fluorocytosine
  modified_base 20: mod_base = OTHER; note = 2'-Omethyluridine
  modified_base 26: mod_base = OTHER; note = 2'-fluoroguanosine phosphorothiorate
  modified_base 28: mod_base = OTHER; note = 2'-fluoroadenosine
  modified_base 29: mod_base = OTHER; note = 2'-Omethylguanosine
  modified_base 34: mod_base = OTHER; note = 2'-fluorouridine
  modified_base 36: mod_base = OTHER; note = 2'-Omethyladenosine
  modified_base 39: mod_base = OTHER; note = 2'-fluorouridine phosphorothiorate
  modified_base 43: mod_base = OTHER; note = 2'-fluorouridine phosphorothiorate
  modified_base 48: mod_base = OTHER; note = 2'-fluorocytosine phosphorothiorate
  modified_base 49: mod_base = OTHER; note = 2'-fluoroguanosine phosphorothiorate
  modified_base 52: mod_base = OTHER; note = 2'-fluoroguanosine phosphorothiorate
  modified_base 54: mod_base = OTHER; note = Uridine phosphorothiorate
  modified_base 55: mod_base = OTHER; note = 2'-fluorouridine phosphorothiorate
  modified_base 75: mod_base = OTHER; note = 2'-Omethylcytosine phosphorothiorate

SEQ ID NO: 9573 - RNA, 76 nt, synthetic construct; identical to SEQ ID NO: 3289
  source 1..76: mol_type = other RNA
  modified_base 1: mod_base = OTHER; note = 2'-Omethylguanosine
  modified_base 2: mod_base = OTHER; note = 2'-Omethylcytosine
  modified_base 3: mod_base = OTHER; note = 2'-Omethylcytosine
  modified_base 4: mod_base = OTHER; note = 2'-Omethyluridine
  modified_base 5: mod_base = OTHER; note = 2'-Omethylguanosine
  modified_base 6: mod_base = OTHER; note = 2'-Omethylguanosine
  modified_base 13: mod_base = OTHER; note = 2'-Omethylcytosine
  modified_base 14: mod_base = OTHER; note = 2'-Omethyladenosine
  modified_base 15: mod_base = OTHER; note = 2'-Omethylguanosine
  modified_base 16: mod_base = OTHER; note = 2'-Omethyluridine
  modified_base 18: mod_base = OTHER; note = 2'-Omethylguanosine
  modified_base 19: mod_base = OTHER; note = 2'-Omethylguanosine
  modified_base 20: mod_base = OTHER; note = Uridine phosphorothiorate
  modified_base 21: mod_base = OTHER; note = Adenosine phosphorothiorate
  modified_base 25: mod_base = OTHER; note = 2'-Omethylcytosine
  modified_base 33: mod_base = OTHER; note = 2'-fluorouridine
  modified_base 34: mod_base = OTHER; note = 2'-Omethyluridine
  modified_base 35: mod_base = OTHER; note = Uridine phosphorothiorate
  modified_base 37: mod_base = OTHER; note = Adenosine phosphorothiorate
  modified_base 38: mod_base = OTHER; note = Adenosine phosphorothiorate
  modified_base 41: mod_base = OTHER; note = 2'-fluorouridine
  modified_base 42: mod_base = OTHER; note = 2'-Omethylguanosine
  modified_base 43: mod_base = OTHER; note = 2'-Omethyladenosine
  modified_base 44: mod_base = OTHER; note = 2'-fluoroguanosine
  modified_base 49: mod_base = OTHER; note = 2'-Omethylcytosine
  modified_base 50: mod_base = OTHER; note = 2'-Omethyladenosine
  modified_base 51: mod_base = OTHER; note = 2'-Omethylguanosine
  modified_base 52: mod_base = OTHER; note = 2'-Omethylguanosine
  modified_base 53: mod_base = OTHER; note = 2'-Omethylguanosine
  modified_base 54: mod_base = OTHER; note = Uridine phosphorothiorate
  modified_base 55: mod_base = OTHER; note = Uridine phosphorothiorate
  modified_base 61: mod_base = OTHER; note = 2'-Omethylcytosine
  modified_base 65: mod_base = OTHER; note = 2'-Omethylguanosine
  modified_base 73: mod_base = OTHER; note = 2'-Omethylguanosine

SEQ ID NO: 9574 - RNA, 75 nt, synthetic construct; identical to SEQ ID NO: 3311
  source 1..75: mol_type = other RNA
  modified_base 1: mod_base = OTHER; note = Guanosine phosphorothiorate
  modified_base 2: mod_base = OTHER; note = 2'-Omethylguanosine phosphorothiorate
  modified_base 15: mod_base = OTHER; note = 2'-fluoroadenosine
  modified_base 16: mod_base = OTHER; note = 2'-fluorouridine phosphorothiorate
  modified_base 20: mod_base = OTHER; note = 2'-fluoroadenosine
  modified_base 21: mod_base = OTHER; note = Adenosine phosphorothiorate
  modified_base 28: mod_base = OTHER; note = 2'-fluorouridine
  modified_base 38: mod_base = OTHER; note = Adenosine phosphorothiorate
  modified_base 40: mod_base = OTHER; note = 2'-fluorocytosine
  modified_base 44: mod_base = OTHER; note = 2'-fluorocytosine
  modified_base 52: mod_base = OTHER; note = 2'-fluoroguanosine phosphorothiorate
  modified_base 53: mod_base = OTHER; note = 2'-fluorouridine
  modified_base 54: mod_base = OTHER; note = 2'-Omethyluridine
  modified_base 65: mod_base = OTHER; note = 2'-fluorouridine
  modified_base 70: mod_base = OTHER; note = Cytosine phosphorothiorate
  modified_base 71: mod_base = OTHER; note = Cytosine phosphorothiorate
  modified_base 74: mod_base = OTHER; note = 2'-fluorocytosine phosphorothiorate

SEQ ID NO: 9575 - RNA, 75 nt, synthetic construct; identical to SEQ ID NO: 3306
  source 1..75: mol_type = other RNA
  modified_base 1: mod_base = OTHER; note = 2'-Omethylguanosine
  modified_base 51: mod_base = OTHER; note = 2'-Omethyluridine

SEQ ID NO: 9576 - RNA, 76 nt, synthetic construct; identical to SEQ ID NO: 3325
  source 1..76: mol_type = other RNA
  modified_base 1: mod_base = OTHER; note = 2'-Omethyluridine phosphorothiorate
  modified_base 2: mod_base = OTHER; note = 2'-Omethyladenosine phosphorothiorate
  modified_base 13: mod_base = OTHER; note = 2'-fluorocytosine
  modified_base 14: mod_base = OTHER; note = 2'-fluoroadenosine
  modified_base 54: mod_base = OTHER; note = 2'-fluorouridine
  modified_base 59: mod_base = OTHER; note = 2'-Omethylguanosine
  modified_base 75: mod_base = OTHER; note = Cytosine phosphorothiorate
  modified_base 76: mod_base = OTHER; note = 2'-Omethyladenosine

SEQ ID NO: 9577 - RNA, 76 nt, synthetic construct
  source 1..76: mol_type = other RNA
gtaggcgtggcgcaatggatagcgcattggacttcaaattcaaaggttccgggttcgagtcccggcgcctacgcca

SEQ ID NO: 9578 - RNA, 75 nt, synthetic construct; identical to SEQ ID NO: 3306
  source 1..75: mol_type = other RNA
  modified_base 17: mod_base = OTHER; note = 2'-Omethylguanosine
  modified_base 51: mod_base = OTHER; note = 2'-Omethyluridine

SEQ ID NO: 9579 - RNA, 76 nt, synthetic construct
  source 1..76: mol_type = other RNA
gggctgatggcgcaatggatagcgcattggacttcaaattcaaaggttccgggttcgagtcccggtcagctcgcca

SEQ ID NO: 9580 - RNA, 76 nt, synthetic construct; identical to SEQ ID NO: 3318
  source 1..76: mol_type = other RNA
  modified_base 1: mod_base = OTHER; note = 2'-Omethylcytosine
  modified_base 14: mod_base = OTHER; note = 2'-Omethyladenosine
  modified_base 15: mod_base = OTHER; note = 2'-Omethylguanosine
  modified_base 16: mod_base = OTHER; note = 2'-Omethyluridine
  modified_base 18: mod_base = OTHER; note = 2'-Omethylguanosine
  modified_base 19: mod_base = OTHER; note = 2'-Omethylguanosine
  modified_base 50: mod_base = OTHER; note = 2'-Omethylcytosine
  modified_base 52: mod_base = OTHER; note = 2'-Omethylguanosine
  modified_base 73: mod_base = OTHER; note = 2'-Omethyladenosine

SEQ ID NO: 9581 - RNA, 76 nt, synthetic construct; identical to SEQ ID NO: 625
  source 1..76: mol_type = other RNA
  modified_base 1: mod_base = OTHER; note = 2'-Omethylguanosine phosphorothiorate
  modified_base 2: mod_base = OTHER; note = 2'-Omethylguanosine
  modified_base 3: mod_base = OTHER; note = 2'-Omethylcytosine
  modified_base 4: mod_base = OTHER; note = 2'-Omethyluridine
  modified_base 5: mod_base = OTHER; note = 2'-Omethylcytosine
  modified_base 6: mod_base = OTHER; note = 2'-Omethylcytosine
  modified_base 16: mod_base = OTHER; note = 2'-Omethyluridine
  modified_base 17: mod_base = OTHER; note = 2'-Omethylguanosine
  modified_base 18: mod_base = OTHER; note = 2'-Omethylguanosine
  modified_base 22: mod_base = OTHER; note = 2'-Omethylguanosine
  modified_base 23: mod_base = OTHER; note = 2'-Omethylcytosine
  modified_base 24: mod_base = OTHER; note = 2'-Omethylguanosine
  modified_base 25: mod_base = OTHER; note = 2'-Omethylcytosine
  modified_base 49: mod_base = OTHER; note = 2'-Omethylcytosine
  modified_base 50: mod_base = OTHER; note = 2'-Omethylcytosine
  modified_base 51: mod_base = OTHER; note = 2'-Omethylguanosine
  modified_base 52: mod_base = OTHER; note = 2'-Omethylguanosine
  modified_base 53: mod_base = OTHER; note = 2'-Omethylguanosine
  modified_base 54: mod_base = OTHER; note = 2'-Omethyluridine phosphorothiorate
  modified_base 56: mod_base = OTHER; note = 2'-Omethylcytosine
  modified_base 57: mod_base = OTHER; note = 2'-fluoroguanosine
  modified_base 59: mod_base = OTHER; note = 2'-Omethylguanosine
  modified_base 73: mod_base = OTHER; note = 2'-Omethylguanosine

SEQ ID NO: 9582 - RNA, 85 nt, synthetic construct; identical to SEQ ID NO: 3301
  source 1..85: mol_type = other RNA
  modified_base 1: mod_base = OTHER; note = 2'-Omethylguanosine phosphorothiorate
  modified_base 3: mod_base = OTHER; note = 2'-Omethyluridine phosphorothiorate
  modified_base 4: mod_base = OTHER; note = Guanosine phosphorothiorate
  modified_base 12: mod_base = OTHER; note = Cytosine phosphorothiorate
  modified_base 14: mod_base = OTHER; note = 2'-fluoroadenosine phosphorothiorate
  modified_base 23: mod_base = OTHER; note = Guanosine phosphorothiorate
  modified_base 25: mod_base = OTHER; note = 2'-fluorocytosine
  modified_base 33: mod_base = OTHER; note = 2'-fluorouridine
  modified_base 44: mod_base = OTHER; note = 2'-fluorouridine
  modified_base 45: mod_base = OTHER; note = 2'-fluoroguanosine phosphorothiorate
  modified_base 50: mod_base = OTHER; note = 2'-Omethylcytosine
  modified_base 56: mod_base = OTHER; note = 2'-Omethylguanosine
  modified_base 60: mod_base = OTHER; note = Adenosine phosphorothiorate
  modified_base 62: mod_base = OTHER; note = 2'-Omethylguanosine
  modified_base 72: mod_base = OTHER; note = 2'-fluorouridine phosphorothiorate
  modified_base 74: mod_base = OTHER; note = 2'-fluorocytosine
  modified_base 78: mod_base = OTHER; note = 2'-fluorocytosine
  modified_base 83: mod_base = OTHER; note = Cytosine phosphorothiorate
  modified_base 84: mod_base = OTHER; note = 2'-Omethylcytosine

SEQ ID NO: 9583 - RNA, 76 nt, synthetic construct; identical to SEQ ID NO: 625
  source 1..76: mol_type = other RNA
  modified_base 1: mod_base = OTHER; note = 2'-Omethylguanosine phosphorothiorate
  modified_base 2: mod_base = OTHER; note = 2'-Omethylguanosine
  modified_base 3: mod_base = OTHER; note = 2'-Omethylcytosine
  modified_base 10: mod_base = OTHER; note = 2'-Omethylguanosine
  modified_base 11: mod_base = OTHER; note = 2'-Omethylcytosine
  modified_base 12: mod_base = OTHER; note = 2'-Omethylguanosine
  modified_base 13: mod_base = OTHER; note = 2'-Omethylcytosine
  modified_base 14: mod_base = OTHER; note = 2'-Omethyladenosine
  modified_base 15: mod_base = OTHER; note = 2'-fluoroadenosine
  modified_base 16: mod_base = OTHER; note = 2'-Omethyluridine
  modified_base 17: mod_base = OTHER; note = 2'-Omethylguanosine
  modified_base 18: mod_base = OTHER; note = 2'-Omethylguanosine
  modified_base 19: mod_base = OTHER; note = 2'-fluoroadenosine
  modified_base 20: mod_base = OTHER; note = 2'-Omethyluridine
  modified_base 22: mod_base = OTHER; note = 2'-Omethylguanosine
  modified_base 23: mod_base = OTHER; note = 2'-Omethylcytosine
  modified_base 24: mod_base = OTHER; note = 2'-Omethylguanosine
  modified_base 25: mod_base = OTHER; note = 2'-Omethylcytosine
  modified_base 38: mod_base = OTHER; note = Adenosine phosphorothiorate
  modified_base 39: mod_base = OTHER; note = Uridine phosphorothiorate
  modified_base 40: mod_base = OTHER; note = 2'-fluorouridine
  modified_base 43: mod_base = OTHER; note = 2'-Omethyladenosine
  modified_base 44: mod_base = OTHER; note = 2'-Omethyladenosine
  modified_base 45: mod_base = OTHER; note = 2'-Omethylguanosine
  modified_base 46: mod_base = OTHER; note = 2'-fluoroguanosine
  modified_base 48: mod_base = OTHER; note = 2'-fluorouridine
  modified_base 49: mod_base = OTHER; note = 2'-Omethylcytosine
  modified_base 50: mod_base = OTHER; note = 2'-Omethylcytosine
  modified_base 51: mod_base = OTHER; note = 2'-Omethylguanosine
  modified_base 52: mod_base = OTHER; note = 2'-Omethylguanosine
  modified_base 53: mod_base = OTHER; note = 2'-Omethylguanosine
  modified_base 54: mod_base = OTHER; note = 2'-Omethyluridine
  modified_base 61: mod_base = OTHER; note = 2'-Omethylcytosine
  modified_base 62: mod_base = OTHER; note = 2'-Omethylcytosine
  modified_base 63: mod_base = OTHER; note = 2'-fluorocytosine
  modified_base 64: mod_base = OTHER; note = 2'-Omethylguanosine
  modified_base 65: mod_base = OTHER; note = 2'-Omethylguanosine
  modified_base 66: mod_base = OTHER; note = 2'-Omethylcytosine
  modified_base 67: mod_base = OTHER; note = 2'-Omethylguanosine
  modified_base 68: mod_base = OTHER; note = 2'-Omethylguanosine
  modified_base 69: mod_base = OTHER; note = 2'-fluoroadenosine

SEQ ID NO: 9584 - RNA, 74 nt, synthetic construct; identical to SEQ ID NO: 3293
  source 1..74: mol_type = other RNA
  modified_base 1: mod_base = OTHER; note = 2'-fluoroadenosine
  modified_base 2: mod_base = OTHER; note = 2'-fluorocytosine phosphorothiorate
  modified_base 3: mod_base = OTHER; note = Cytosine phosphorothiorate
  modified_base 8: mod_base = OTHER; note = Guanosine phosphorothiorate
  modified_base 10: mod_base = OTHER; note = 2'-Omethylcytosine phosphorothiorate
  modified_base 12: mod_base = OTHER; note = 2'-fluorocytosine
  modified_base 22: mod_base = OTHER; note = Guanosine phosphorothiorate
  modified_base 27: mod_base = OTHER; note = 2'-fluorouridine
  modified_base 43: mod_base = OTHER; note = 2'-fluoroguanosine phosphorothiorate
  modified_base 51: mod_base = OTHER; note = 2'-Omethylguanosine phosphorothiorate
  modified_base 73: mod_base = OTHER; note = 2'-Omethylcytosine

SEQ ID NO: 9585 - RNA, 86 nt, synthetic construct; identical to SEQ ID NO: 3290
  source 1..86: mol_type = other RNA
  modified_base 63: mod_base = OTHER; note = Guanosine phosphorothiorate

SEQ ID NO: 9586 - RNA, 76 nt, synthetic construct; identical to SEQ ID NO: 3289
  source 1..76: mol_type = other RNA
  modified_base 1: mod_base = OTHER; note = 2'-Omethylguanosine
  modified_base 2: mod_base = OTHER; note = 2'-Omethylcytosine
  modified_base 3: mod_base = OTHER; note = 2'-Omethylcytosine
  modified_base 4: mod_base = OTHER; note = 2'-Omethyluridine
  modified_base 5: mod_base = OTHER; note = 2'-Omethylguanosine
  modified_base 6: mod_base = OTHER; note = 2'-Omethylguanosine
  modified_base 14: mod_base = OTHER; note = 2'-Omethyladenosine
  modified_base 15: mod_base = OTHER; note = 2'-Omethylguanosine
  modified_base 16: mod_base = OTHER; note = 2'-Omethyluridine
  modified_base 18: mod_base = OTHER; note = 2'-Omethylguanosine
  modified_base 19: mod_base = OTHER; note = 2'-Omethylguanosine
  modified_base 25: mod_base = OTHER; note = 2'-Omethylcytosine
  modified_base 41: mod_base = OTHER; note = 2'-Omethyluridine
  modified_base 42: mod_base = OTHER; note = 2'-Omethylguanosine
  modified_base 43: mod_base = OTHER; note = 2'-Omethyladenosine
  modified_base 44: mod_base = OTHER; note = 2'-Omethylguanosine
  modified_base 49: mod_base = OTHER; note = 2'-Omethylcytosine
  modified_base 50: mod_base = OTHER; note = 2'-Omethyladenosine
  modified_base 52: mod_base = OTHER; note = 2'-Omethylguanosine
  modified_base 54: mod_base = OTHER; note = 2'-Omethyluridine
  modified_base 55: mod_base = OTHER; note = Uridine phosphorothiorate
  modified_base 56: mod_base = OTHER; note = 2'-Omethylcytosine
  modified_base 57: mod_base = OTHER; note = 2'-fluoroadenosine
  modified_base 59: mod_base = OTHER; note = 2'-Omethylguanosine
  modified_base 61: mod_base = OTHER; note = 2'-Omethylcytosine
  modified_base 65: mod_base = OTHER; note = 2'-Omethylguanosine
  modified_base 73: mod_base = OTHER; note = 2'-Omethylguanosine

SEQ ID NO: 9587 - RNA, 76 nt, synthetic construct; identical to SEQ ID NO: 625
  source 1..76: mol_type = other RNA
  modified_base 1: mod_base = OTHER; note = 2'-Omethylguanosine
  modified_base 17: mod_base = OTHER; note = 2'-Omethylguanosine
  modified_base 18: mod_base = OTHER; note = 2'-Omethylguanosine
  modified_base 33: mod_base = OTHER; note = 2'-fluorouridine
  modified_base 50: mod_base = OTHER; note = 2'-Omethylcytosine
  modified_base 52: mod_base = OTHER; note = 2'-Omethylguanosine
  modified_base 55: mod_base = OTHER; note = Thymine
  modified_base 73: mod_base = OTHER; note = 2'-Omethylguanosine

SEQ ID NO: 9588 - RNA, 74 nt, synthetic construct; identical to SEQ ID NO: 3293
  source 1..74: mol_type = other RNA
  modified_base 1: mod_base = OTHER; note = 2'-fluoroadenosine
  modified_base 4: mod_base = OTHER; note = Uridine phosphorothiorate
  modified_base 6: mod_base = OTHER; note = 2'-fluoroguanosine
  modified_base 10: mod_base = OTHER; note = Cytosine phosphorothiorate
  modified_base 27: mod_base = OTHER; note = 2'-fluorouridine
  modified_base 43: mod_base = OTHER; note = Guanosine phosphorothiorate
  modified_base 62: mod_base = OTHER; note = Guanosine phosphorothiorate
  modified_base 73: mod_base = OTHER; note = 2'-Omethylcytosine phosphorothiorate
  modified_base 74: mod_base = OTHER; note = 2'-fluoroadenosine

SEQ ID NO: 9589 - RNA, 76 nt, synthetic construct; identical to SEQ ID NO: 3318
  source 1..76: mol_type = other RNA
  modified_base 1: mod_base = OTHER; note = 2'-Omethylcytosine
  modified_base 16: mod_base = OTHER; note = 2'-Omethyluridine
  modified_base 18: mod_base = OTHER; note = 2'-Omethylguanosine
  modified_base 19: mod_base = OTHER; note = 2'-Omethylguanosine
  modified_base 54: mod_base = OTHER; note = 2'-Omethyluridine
  modified_base 56: mod_base = OTHER; note = 2'-Omethylcytosine
  modified_base 59: mod_base = OTHER; note = 2'-Omethyladenosine
  modified_base 73: mod_base = OTHER; note = 2'-Omethyladenosine

SEQ ID NO: 9590 - RNA, 75 nt, synthetic construct; identical to SEQ ID NO: 3299
  source 1..75: mol_type = other RNA
  modified_base 20: mod_base = OTHER; note = 2'-fluoroadenosine
  modified_base 21: mod_base = OTHER; note = 2'-Omethylguanosine phosphorothiorate
  modified_base 27: mod_base = OTHER; note = Cytosine phosphorothiorate
  modified_base 29: mod_base = OTHER; note = 2'-fluoroguanosine phosphorothiorate
  modified_base 46: mod_base = OTHER; note = 2'-fluorouridine
  modified_base 47: mod_base = OTHER; note = 2'-fluorocytosine
  modified_base 55: mod_base = OTHER; note = 2'-Omethylcytosine phosphorothiorate
  modified_base 63: mod_base = OTHER; note = 2'-Omethyluridine phosphorothiorate
  modified_base 74: mod_base = OTHER; note = Cytosine phosphorothiorate

SEQ ID NO: 9591 - RNA, 76 nt, synthetic construct; identical to SEQ ID NO: 625
  source 1..76: mol_type = other RNA
  modified_base 1: mod_base = OTHER; note = 2'-fluoroguanosine phosphorothiorate
  modified_base 2: mod_base = OTHER; note = 2'-fluoroguanosine phosphorothiorate
  modified_base 3: mod_base = OTHER; note = 2'-fluorocytosine
  modified_base 4: mod_base = OTHER; note = 2'-fluorouridine
  modified_base 5: mod_base = OTHER; note = 2'-Omethylcytosine
  modified_base 7: mod_base = OTHER; note = Guanosine phosphorothiorate
  modified_base 9: mod_base = OTHER; note = Guanosine phosphorothiorate
  modified_base 10: mod_base = OTHER; note = 2'-Omethylguanosine phosphorothiorate
  modified_base 13: mod_base = OTHER; note = Cytosine phosphorothiorate
  modified_base 14: mod_base = OTHER; note = Adenosine phosphorothiorate
  modified_base 15: mod_base = OTHER; note = 2'-Omethyladenosine
  modified_base 16: mod_base = OTHER; note = 2'-Omethyluridine
  modified_base 18: mod_base = OTHER; note = Guanosine phosphorothiorate
  modified_base 23: mod_base = OTHER; note = 2'-Omethylcytosine phosphorothiorate
  modified_base 26: mod_base = OTHER; note = 2'-Omethyladenosine
  modified_base 29: mod_base = OTHER; note = 2'-Omethylguanosine
  modified_base 34: mod_base = OTHER; note = 2'-Omethyluridine phosphorothiorate
  modified_base 37: mod_base = OTHER; note = Adenosine phosphorothiorate
  modified_base 39: mod_base = OTHER; note = Uridine phosphorothiorate
  modified_base 40: mod_base = OTHER; note = Uridine phosphorothiorate
  modified_base 41: mod_base = OTHER; note = 2'-Omethylcytosine
  modified_base 42: mod_base = OTHER; note = 2'-Omethyladenosine
  modified_base 45: mod_base = OTHER; note = 2'-Omethylguanosine
  modified_base 46: mod_base = OTHER; note = 2'-Omethylguanosine
  modified_base 47: mod_base = OTHER; note = 2'-fluorouridine
  modified_base 48: mod_base = OTHER; note = 2'-fluorouridine
  modified_base 50: mod_base = OTHER; note = 2'-Omethylcytosine
  modified_base 52: mod_base = OTHER; note = Guanosine phosphorothiorate
  modified_base 57: mod_base = OTHER; note = 2'-fluoroguanosine
  modified_base 58: mod_base = OTHER; note = Adenosine phosphorothiorate
  modified_base 59: mod_base = OTHER; note = 2'-fluoroguanosine
  modified_base 61: mod_base = OTHER; note = Cytosine phosphorothiorate
  modified_base 64: mod_base = OTHER; note = 2'-Omethylguanosine
  modified_base 69: mod_base = OTHER; note = 2'-Omethyladenosine
  modified_base 74: mod_base = OTHER; note = 2'-Omethylcytosine phosphorothiorate
  modified_base 75: mod_base = OTHER; note = 2'-fluorocytosine
  modified_base 76: mod_base = OTHER; note = 2'-fluoroadenosine

SEQ ID NO: 9592 - RNA, 86 nt, synthetic construct; identical to SEQ ID NO: 3290
  source 1..86: mol_type = other RNA
  modified_base 37: mod_base = OTHER; note = Guanosine phosphorothiorate

SEQ ID NO: 9593 - RNA, 75 nt, synthetic construct; identical to SEQ ID NO: 1045
  source 1..75: mol_type = other RNA
  modified_base 1: mod_base = OTHER; note = 2'-Omethylguanosine
  modified_base 53: mod_base = OTHER; note = 2'-Omethyluridine phosphorothiorate
  modified_base 54: mod_base = OTHER; note = Uridine phosphorothiorate
  modified_base 55: mod_base = OTHER; note = 2'-Omethylcytosine
  modified_base 56: mod_base = OTHER; note = 2'-fluoroguanosine
  modified_base 57: mod_base = OTHER; note = 2'-fluoroadenosine phosphorothiorate
  modified_base 58: mod_base = OTHER; note = 2'-Omethylguanosine
  modified_base 59: mod_base = OTHER; note = 2'-fluorouridine
  modified_base 72: mod_base = OTHER; note = 2'-Omethyluridine

SEQ ID NO: 9594 - RNA, 86 nt, synthetic construct; identical to SEQ ID NO: 3290
  source 1..86: mol_type = other RNA
  modified_base 1: mod_base = OTHER; note = 2'-Omethyladenosine
  modified_base 19: mod_base = OTHER; note = 2'-Omethyluridine
  modified_base 20: mod_base = OTHER; note = 2'-Omethyluridine
  modified_base 22: mod_base = OTHER; note = 2'-Omethyladenosine
  modified_base 40: mod_base = OTHER; note = 2'-fluorocytosine
  modified_base 41: mod_base = OTHER; note = 2'-Omethylcytosine
  modified_base 42: mod_base = OTHER; note = 2'-Omethyladenosine
  modified_base 43: mod_base = OTHER; note = 2'-Omethyladenosine
  modified_base 83: mod_base = OTHER; note = 2'-Omethyladenosine

SEQ ID NO: 9595 - RNA, 76 nt, synthetic construct; identical to SEQ ID NO: 3289
  source 1..76: mol_type = other RNA
  modified_base 1: mod_base = OTHER; note = 2'-Omethylguanosine phosphorothiorate
  modified_base 2: mod_base = OTHER; note = 2'-Omethylcytosine phosphorothiorate
  modified_base 74: mod_base = OTHER; note = Cytosine phosphorothiorate
  modified_base 75: mod_base = OTHER; note = 2'-Omethylcytosine

SEQ ID NO: 9596 - RNA, 76 nt, synthetic construct; identical to SEQ ID NO: 625
  source 1..76: mol_type = other RNA
  modified_base 4: mod_base = OTHER; note = 2'-Omethyluridine
  modified_base 5: mod_base = OTHER; note = Cytosine phosphorothiorate
  modified_base 8: mod_base = OTHER; note = Uridine phosphorothiorate
  modified_base 10: mod_base = OTHER; note = Guanosine phosphorothiorate
  modified_base 11: mod_base = OTHER; note = 2'-fluorocytosine phosphorothiorate
  modified_base 12: mod_base = OTHER; note = Guanosine phosphorothiorate
  modified_base 13: mod_base = OTHER; note = 2'-Omethylcytosine
  modified_base 15: mod_base = OTHER; note = Adenosine phosphorothiorate
  modified_base 20: mod_base = OTHER; note = 2'-Omethyluridine
  modified_base 22: mod_base = OTHER; note = 2'-fluoroguanosine
  modified_base 25: mod_base = OTHER; note = 2'-fluorocytosine
  modified_base 27: mod_base = OTHER; note = 2'-Omethyluridine
  modified_base 31: mod_base = OTHER; note = 2'-Omethyladenosine
  modified_base 34: mod_base = OTHER; note = 2'-fluorouridine
  modified_base 36: mod_base = OTHER; note = Adenosine phosphorothiorate
  modified_base 41: mod_base = OTHER; note = 2'-Omethylcytosine
  modified_base 42: mod_base = OTHER; note = 2'-Omethyladenosine
  modified_base 44: mod_base = OTHER; note = 2'-fluoroadenosine
  modified_base 47: mod_base = OTHER; note = 2'-Omethyluridine phosphorothiorate
  modified_base 48: mod_base = OTHER; note = 2'-Omethyluridine
  modified_base 50: mod_base = OTHER; note = 2'-fluorocytosine
  modified_base 52: mod_base = OTHER; note = 2'-Omethylguanosine
  modified_base 53: mod_base = OTHER; note = 2'-fluoroguanosine
  modified_base 54: mod_base = OTHER; note = 2'-fluorouridine
  modified_base 56: mod_base = OTHER; note = 2'-Omethylcytosine
  modified_base 58: mod_base = OTHER; note = 2'-fluoroadenosine phosphorothiorate
  modified_base 59: mod_base = OTHER; note = 2'-Omethylguanosine
  modified_base 62: mod_base = OTHER; note = 2'-fluorocytosine phosphorothiorate
  modified_base 63: mod_base = OTHER; note = 2'-Omethylcytosine
  modified_base 65: mod_base = OTHER; note = 2'-fluoroguanosine
  modified_base 68: mod_base = OTHER; note = 2'-fluoroguanosine phosphorothiorate
  modified_base 69: mod_base = OTHER; note = 2'-fluoroadenosine
  modified_base 70: mod_base = OTHER; note = Guanosine phosphorothiorate
  modified_base 71: mod_base = OTHER; note = 2'-fluorouridine
  modified_base 73: mod_base = OTHER; note = 2'-fluoroguanosine
  modified_base 76: mod_base = OTHER; note = 2'-fluoroadenosine

SEQ ID NO: 9597 - RNA, 76 nt, synthetic construct; identical to SEQ ID NO: 625
  source 1..76: mol_type = other RNA
  modified_base 10: mod_base = OTHER; note = 2'-fluoroguanosine
  modified_base 11: mod_base = OTHER; note = 2'-fluorocytosine
  modified_base 13: mod_base = OTHER; note = Cytosine phosphorothiorate
  modified_base 15: mod_base = OTHER; note = 2'-fluoroadenosine
  modified_base 18: mod_base = OTHER; note = 2'-fluoroguanosine phosphorothiorate
  modified_base 20: mod_base = OTHER; note = Uridine phosphorothiorate
  modified_base 24: mod_base = OTHER; note = 2'-Omethylguanosine
  modified_base 27: mod_base = OTHER; note = 2'-Omethyluridine
  modified_base 29: mod_base = OTHER; note = 2'-fluoroguanosine
  modified_base 31: mod_base = OTHER; note = 2'-fluoroadenosine
  modified_base 38: mod_base = OTHER; note = 2'-Omethyladenosine
  modified_base 40: mod_base = OTHER; note = 2'-fluorouridine
  modified_base 42: mod_base = OTHER; note = 2'-Omethyladenosine
  modified_base 43: mod_base = OTHER; note = 2'-Omethyladenosine
  modified_base 53: mod_base = OTHER; note = 2'-fluoroguanosine phosphorothiorate
  modified_base 54: mod_base = OTHER; note = 2'-fluorouridine
  modified_base 55: mod_base = OTHER; note = Uridine phosphorothiorate
  modified_base 56: mod_base = OTHER; note = 2'-Omethylcytosine
  modified_base 57: mod_base = OTHER; note = 2'-Omethylguanosine
  modified_base 59: mod_base = OTHER; note = 2'-Omethylguanosine
  modified_base 60: mod_base = OTHER; note = 2'-fluorouridine
  modified_base 61: mod_base = OTHER; note = 2'-fluorocytosine
  modified_base 62: mod_base = OTHER; note = 2'-Omethylcytosine
  modified_base 63: mod_base = OTHER; note = Cytosine phosphorothiorate
  modified_base 65: mod_base = OTHER; note = 2'-Omethylguanosine phosphorothiorate
  modified_base 66: mod_base = OTHER; note = 2'-fluorocytosine
  modified_base 67: mod_base = OTHER; note = Guanosine phosphorothiorate
  modified_base 68: mod_base = OTHER; note = 2'-fluoroguanosine
  modified_base 69: mod_base = OTHER; note = 2'-fluoroadenosine
  modified_base 70: mod_base = OTHER; note = 2'-fluoroguanosine
  modified_base 71: mod_base = OTHER; note = 2'-fluorouridine phosphorothiorate
  modified_base 72: mod_base = OTHER; note = 2'-fluorocytosine
  modified_base 74: mod_base = OTHER; note = Cytosine phosphorothiorate
  modified_base 75: mod_base = OTHER; note = 2'-Omethylcytosine

SEQ ID NO: 9598 - RNA, 76 nt, synthetic construct; identical to SEQ ID NO: 625
  source 1..76: mol_type = other RNA
  modified_base 1: mod_base = OTHER; note = 2'-fluoroguanosine
  modified_base 2: mod_base = OTHER; note = 2'-Omethylguanosine
  modified_base 6: mod_base = OTHER; note = 2'-fluorocytosine
  modified_base 10: mod_base = OTHER; note = 2'-fluoroguanosine
  modified_base 11: mod_base = OTHER; note = 2'-Omethylcytosine
  modified_base 12: mod_base = OTHER; note = Guanosine phosphorothiorate
  modified_base 13: mod_base = OTHER; note = 2'-Omethylcytosine
  modified_base 14: mod_base = OTHER; note = 2'-Omethyladenosine
  modified_base 18: mod_base = OTHER; note = Guanosine phosphorothiorate
  modified_base 21: mod_base = OTHER; note = Adenosine phosphorothiorate
  modified_base 24: mod_base = OTHER; note = Guanosine phosphorothiorate
  modified_base 26: mod_base = OTHER; note = 2'-fluoroadenosine phosphorothiorate
  modified_base 27: mod_base = OTHER; note = 2'-fluorouridine
  modified_base 28: mod_base = OTHER; note = 2'-fluorouridine
  modified_base 29: mod_base = OTHER; note = 2'-fluoroguanosine
  modified_base 38: mod_base = OTHER; note = 2'-Omethyladenosine
  modified_base 39: mod_base = OTHER; note = 2'-Omethyluridine
  modified_base 40: mod_base = OTHER; note = 2'-fluorouridine
  modified_base 47: mod_base = OTHER; note = 2'-fluorouridine
  modified_base 48: mod_base = OTHER; note = 2'-fluorouridine
  modified_base 49: mod_base = OTHER; note = Cytosine phosphorothiorate
  modified_base 50: mod_base = OTHER; note = 2'-Omethylcytosine
  modified_base 51: mod_base = OTHER; note = 2'-Omethylguanosine
  modified_base 53: mod_base = OTHER; note = 2'-fluoroguanosine
  modified_base 55: mod_base = OTHER; note = Uridine phosphorothiorate
  modified_base 56: mod_base = OTHER; note = 2'-Omethylcytosine
  modified_base 57: mod_base = OTHER; note = Guanosine phosphorothiorate
  modified_base 58: mod_base = OTHER; note = 2'-fluoroadenosine
  modified_base 62: mod_base = OTHER; note = Cytosine phosphorothiorate
  modified_base 63: mod_base = OTHER; note = 2'-Omethylcytosine
  modified_base 65: mod_base = OTHER; note = Guanosine phosphorothiorate
  modified_base 66: mod_base = OTHER; note = 2'-Omethylcytosine
  modified_base 67: mod_base = OTHER; note = Guanosine phosphorothiorate
  modified_base 68: mod_base = OTHER; note = 2'-fluoroguanosine
  modified_base 71: mod_base = OTHER; note = 2'-Omethyluridine phosphorothiorate
  modified_base 73: mod_base = OTHER; note = Guanosine phosphorothiorate
  modified_base 74: mod_base = OTHER; note = 2'-fluorocytosine
  modified_base 75: mod_base = OTHER; note = 2'-fluorocytosine

SEQ ID NO: 9599 - RNA, 76 nt, synthetic construct; identical to SEQ ID NO: 625
  source 1..76: mol_type = other RNA
  modified_base 1: mod_base = OTHER; note = 2'-Omethylguanosine phosphorothiorate
  modified_base 2: mod_base = OTHER; note = 2'-Omethylguanosine
  modified_base 13: mod_base = OTHER; note = 2'-Omethylcytosine
  modified_base 33: mod_base = OTHER; note = 2'-fluorouridine
  modified_base 35: mod_base = OTHER; note = Cytosine phosphorothiorate
  modified_base 37: mod_base = OTHER; note = Adenosine phosphorothiorate
  modified_base 38: mod_base = OTHER; note = Adenosine phosphorothiorate
  modified_base 52: mod_base = OTHER; note = 2'-Omethylguanosine
  modified_base 62: mod_base = OTHER; note = 2'-Omethylcytosine
  modified_base 63: mod_base = OTHER; note = 2'-fluorocytosine
  modified_base 73: mod_base = OTHER; note = 2'-Omethylguanosine
  modified_base 75: mod_base = OTHER; note = 2'-fluorocytosine phosphorothiorate

SEQ ID NO: 9600 - DNA, 76 bp, synthetic construct; identical to SEQ ID NO: 1924
  source 1..76: mol_type = other DNA
  modified_base 1: mod_base = OTHER; note = 2'-Omethylguanosine
  modified_base 2: mod_base = OTHER; note = 2'-Omethylguanosine
  modified_base 3: mod_base = OTHER; note = 2'-Omethylcytosine
  modified_base 4: mod_base = OTHER; note = 2'-Omethyluridine
  modified_base 5: mod_base = OTHER; note = 2'-Omethylcytosine
  modified_base 6: mod_base = OTHER; note = 2'-Omethylcytosine
  modified_base 10: mod_base = OTHER; note = 2'-Omethylguanosine
  modified_base 13: mod_base = OTHER; note = 2'-Omethylcytosine
  modified_base 14: mod_base = OTHER; note = 2'-Omethyladenosine
  modified_base 15: mod_base = OTHER; note = 2'-fluoroadenosine
  modified_base 16: mod_base = OTHER; note = 2'-Omethyluridine
  modified_base 17: mod_base = OTHER; note = Guanosine phosphorothiorate
  modified_base 18: mod_base = OTHER; note = 2'-Omethylguanosine
  modified_base 19: mod_base = OTHER; note = Adenosine phosphorothiorate
  modified_base 20: mod_base = OTHER; note = 2'-Omethyluridine
  modified_base 21: mod_base = OTHER; note = Adenosine phosphorothiorate
  modified_base 25: mod_base = OTHER; note = 2'-Omethylcytosine
  modified_base 29: mod_base = OTHER; note = 2'-Omethylguanosine
  modified_base 33: mod_base = OTHER; note = 2'-fluorouridine
  modified_base 35: mod_base = OTHER; note = Cytosine phosphorothiorate
  modified_base 37: mod_base = OTHER; note = Adenosine phosphorothiorate
  modified_base 38: mod_base = OTHER; note = Adenosine phosphorothiorate
  modified_base 40: mod_base = OTHER; note = 2'-fluorouridine
  modified_base 41: mod_base = OTHER; note = 2'-Omethylcytosine
  modified_base 42: mod_base = OTHER; note = 2'-Omethyladenosine
  modified_base 43: mod_base = OTHER; note = 2'-Omethyladenosine
  modified_base 44: mod_base = OTHER; note = 2'-fluoroadenosine
  modified_base 45: mod_base = OTHER; note = 2'-fluoroguanosine
  modified_base 46: mod_base = OTHER; note = Guanosine phosphorothiorate
  modified_base 49: mod_base = OTHER; note = 2'-Omethylcytosine
  modified_base 50: mod_base = OTHER; note = 2'-Omethylcytosine
  modified_base 51: mod_base = OTHER; note = 2'-Omethylguanosine
  modified_base 52: mod_base = OTHER; note = 2'-Omethylguanosine
  modified_base 53: mod_base = OTHER; note = 2'-Omethylguanosine
  modified_base 54: mod_base = OTHER; note = Uridine phosphorothiorate
  modified_base 55: mod_base = OTHER; note = Uridine phosphorothiorate
  modified_base 56: mod_base = OTHER; note = 2'-Omethylcytosine
  modified_base 57: mod_base = OTHER; note = Guanosine phosphorothiorate
  modified_base 61: mod_base = OTHER; note = 2'-Omethylcytosine
  modified_base 62: mod_base = OTHER; note = 2'-Omethylcytosine
  modified_base 63: mod_base = OTHER; note = 2'-fluorocytosine
  modified_base 64: mod_base = OTHER; note = 2'-Omethylguanosine
  modified_base 65: mod_base = OTHER; note = 2'-Omethylguanosine phosphorothiorate
  modified_base 66: mod_base = OTHER; note = 2'-Omethylcytosine
  modified_base 67: mod_base = OTHER; note = 2'-Omethylguanosine
  modified_base 68: mod_base = OTHER; note = 2'-Omethylguanosine
  modified_base 69: mod_base = OTHER; note = 2'-fluoroadenosine
  modified_base 71: mod_base = OTHER; note = 2'-Omethyluridine
  modified_base 73: mod_base = OTHER; note = 2'-Omethylguanosine
  modified_base 74: mod_base = OTHER; note = Cytosine phosphorothiorate
  modified_base 75: mod_base = OTHER; note = 2'-fluorocytosine phosphorothiorate
  misc_feature 1..21: note = RNA
  misc_feature 22: note = DNA
  misc_feature 23..76: note = RNA

SEQ ID NO: 9601 - RNA, 73 nt, synthetic construct; identical to SEQ ID NO: 935
  source 1..73: mol_type = other RNA
  modified_base 1: mod_base = OTHER; note = 2'-Omethylguanosine phosphorothiorate
  modified_base 2: mod_base = OTHER; note = 2'-Omethylguanosine
  modified_base 3: mod_base = OTHER; note = 2'-Omethylcytosine
  modified_base 4: mod_base = OTHER; note = 2'-Omethyluridine
  modified_base 5: mod_base = OTHER; note = 2'-Omethylcytosine
  modified_base 6: mod_base = OTHER; note = 2'-Omethylcytosine
  modified_base 54: mod_base = OTHER; note = 2'-Omethyluridine phosphorothiorate
  modified_base 56: mod_base = OTHER; note = 2'-Omethylcytosine
  modified_base 57: mod_base = OTHER; note = 2'-fluoroguanosine
  modified_base 59: mod_base = OTHER; note = 2'-Omethylguanosine
  modified_base 72: mod_base = OTHER; note = 2'-Omethylcytosine

SEQ ID NO: 9602 - RNA, 76 nt, synthetic construct; identical to SEQ ID NO: 625
  source 1..76: mol_type = other RNA
  modified_base 2: mod_base = OTHER; note = 2'-Omethylguanosine
  modified_base 3: mod_base = OTHER; note = 2'-Omethylcytosine
  modified_base 5: mod_base = OTHER; note = Cytosine phosphorothiorate
  modified_base 6: mod_base = OTHER; note = 2'-Omethylcytosine
  modified_base 11: mod_base = OTHER; note = 2'-Omethylcytosine
  modified_base 13: mod_base = OTHER; note = Cytosine phosphorothiorate
  modified_base 14: mod_base = OTHER; note = 2'-Omethyladenosine phosphorothiorate
  modified_base 16: mod_base = OTHER; note = 2'-fluorouridine
  modified_base 19: mod_base = OTHER; note = Adenosine phosphorothiorate
  modified_base 20: mod_base = OTHER; note = 2'-Omethyluridine
  modified_base 21: mod_base = OTHER; note = Adenosine phosphorothiorate
  modified_base 22: mod_base = OTHER; note = 2'-Omethylguanosine
  modified_base 23: mod_base = OTHER; note = 2'-Omethylcytosine phosphorothiorate
  modified_base 24: mod_base = OTHER; note = Guanosine phosphorothiorate
  modified_base 26: mod_base = OTHER; note = 2'-Omethyladenosine
  modified_base 28: mod_base = OTHER; note = 2'-Omethyluridine
  modified_base 29: mod_base = OTHER; note = Guanosine phosphorothiorate
  modified_base 30: mod_base = OTHER; note = 2'-Omethylguanosine
  modified_base 33: mod_base = OTHER; note = Uridine phosphorothiorate
  modified_base 34: mod_base = OTHER; note = 2'-Omethyluridine
  modified_base 36: mod_base = OTHER; note = Adenosine phosphorothiorate
  modified_base 38: mod_base = OTHER; note = 2'-Omethyladenosine
  modified_base 39: mod_base = OTHER; note = 2'-Omethyluridine
  modified_base 41: mod_base = OTHER; note = 2'-Omethylcytosine
  modified_base 42: mod_base = OTHER; note = Adenosine phosphorothiorate
  modified_base 44: mod_base = OTHER; note = 2'-fluoroadenosine
  modified_base 50: mod_base = OTHER; note = Cytosine phosphorothiorate
  modified_base 52: mod_base = OTHER; note = 2'-fluoroguanosine
  modified_base 56: mod_base = OTHER; note = 2'-fluorocytosine
  modified_base 57: mod_base = OTHER; note = 2'-Omethylguanosine phosphorothiorate
  modified_base 58: mod_base = OTHER; note = 2'-fluoroadenosine
  modified_base 59: mod_base = OTHER; note = 2'-Omethylguanosine
  modified_base 60: mod_base = OTHER; note = 2'-fluorouridine
  modified_base 63: mod_base = OTHER; note = Cytosine phosphorothiorate
  modified_base 64: mod_base = OTHER; note = 2'-Omethylguanosine
  modified_base 65: mod_base = OTHER; note = Guanosine phosphorothiorate
  modified_base 66: mod_base = OTHER; note = 2'-Omethylcytosine phosphorothiorate
  modified_base 67: mod_base = OTHER; note = 2'-fluoroguanosine
  modified_base 74: mod_base = OTHER; note = 2'-fluorocytosine

SEQ ID NO: 9603 - RNA, 85 nt, synthetic construct; identical to SEQ ID NO: 3288
  source 1..85: mol_type = other RNA
  modified_base 1: mod_base = OTHER; note = 2'-Omethylcytosine
  modified_base 3: mod_base = OTHER; note = Adenosine phosphorothiorate
  modified_base 10: mod_base = OTHER; note = Cytosine phosphorothiorate
  modified_base 13: mod_base = OTHER; note = 2'-Omethyladenosine
  modified_base 30: mod_base = OTHER; note = 2'-fluoroadenosine
  modified_base 32: mod_base = OTHER; note = 2'-fluorouridine
  modified_base 35: mod_base = OTHER; note = 2'-fluoroadenosine
  modified_base 36: mod_base = OTHER; note = 2'-fluoroguanosine phosphorothiorate
  modified_base 42: mod_base = OTHER; note = Adenosine phosphorothiorate
  modified_base 43: mod_base = OTHER; note = 2'-Omethyluridine
  modified_base 46: mod_base = OTHER; note = Adenosine phosphorothiorate
  modified_base 53: mod_base = OTHER; note = 2'-Omethyluridine
  modified_base 55: mod_base = OTHER; note = 2'-Omethylcytosine
  modified_base 57: mod_base = OTHER; note = 2'-fluorocytosine
  modified_base 59: mod_base = OTHER; note = Uridine phosphorothiorate
  modified_base 64: mod_base = OTHER; note = Uridine phosphorothiorate
  modified_base 73: mod_base = OTHER; note = 2'-fluoroadenosine phosphorothiorate
  modified_base 83: mod_base = OTHER; note = Cytosine phosphorothiorate

SEQ ID NO: 9604 - RNA, 76 nt, synthetic construct; identical to SEQ ID NO: 3419
  source 1..76: mol_type = other RNA
  modified_base 1: mod_base = OTHER; note = 2'-Omethylguanosine
  modified_base 2: mod_base = OTHER; note = 2'-Omethylguanosine
  modified_base 3: mod_base = OTHER; note = 2'-Omethylcytosine
  modified_base 4: mod_base = OTHER; note = 2'-Omethyluridine
  modified_base 5: mod_base = OTHER; note = 2'-Omethylcytosine
  modified_base 6: mod_base = OTHER; note = 2'-Omethylcytosine
  modified_base 13: mod_base = OTHER; note = 2'-Omethylcytosine
  modified_base 14: mod_base = OTHER; note = 2'-Omethyladenosine
  modified_base 15: mod_base = OTHER; note = 2'-Omethyladenosine
  modified_base 16: mod_base = OTHER; note = 2'-Omethyluridine
  modified_base 17: mod_base = OTHER; note = 2'-Omethylguanosine
  modified_base 18: mod_base = OTHER; note = 2'-Omethylguanosine
  modified_base 19: mod_base = OTHER; note = Adenosine phosphorothiorate
  modified_base 20: mod_base = OTHER; note = 2'-Omethyluridine
  modified_base 21: mod_base = OTHER; note = Adenosine phosphorothiorate
  modified_base 25: mod_base = OTHER; note = 2'-Omethylcytosine
  modified_base 33: mod_base = OTHER; note = Uridine phosphorothiorate
  modified_base 34: mod_base = OTHER; note = 2'-Omethyluridine
  modified_base 35: mod_base = OTHER; note = Cytosine phosphorothiorate
  modified_base 37: mod_base = OTHER; note = Adenosine phosphorothiorate
  modified_base 38: mod_base = OTHER; note = Adenosine phosphorothiorate
  modified_base 49: mod_base = OTHER; note = 2'-Omethylcytosine
  modified_base 50: mod_base = OTHER; note = 2'-Omethylcytosine
  modified_base 51: mod_base = OTHER; note = 2'-Omethylguanosine
  modified_base 52: mod_base = OTHER; note = 2'-Omethylguanosine
  modified_base 53: mod_base = OTHER; note = 2'-Omethylguanosine
  modified_base 54: mod_base = OTHER; note = Uridine phosphorothiorate
  modified_base 55: mod_base = OTHER; note = Uridine phosphorothiorate
  modified_base 61: mod_base = OTHER; note = 2'-Omethylcytosine
  modified_base 65: mod_base = OTHER; note = 2'-Omethylguanosine
  modified_base 73: mod_base = OTHER; note = 2'-Omethylguanosine

SEQ ID NO: 9605 - RNA, 75 nt, synthetic construct; identical to SEQ ID NO: 3299
  source 1..75: mol_type = other RNA
  modified_base 9: mod_base = OTHER; note = 2'-fluoroguanosine phosphorothiorate
  modified_base 18: mod_base = OTHER; note = 2'-fluoroguanosine
  modified_base 19: mod_base = OTHER; note = 2'-fluorouridine
  modified_base 25: mod_base = OTHER; note = 2'-Omethyladenosine phosphorothiorate
  modified_base 29: mod_base = OTHER; note = Guanosine phosphorothiorate
  modified_base 42: mod_base = OTHER; note = 2'-fluoroadenosine phosphorothiorate
  modified_base 47: mod_base = OTHER; note = 2'-fluorocytosine
  modified_base 48: mod_base = OTHER; note = Cytosine phosphorothiorate
  modified_base 69: mod_base = OTHER; note = 2'-fluoroguanosine phosphorothiorate
  modified_base 73: mod_base = OTHER; note = Cytosine phosphorothiorate

SEQ ID NO: 9606 - RNA, 86 nt, synthetic construct; identical to SEQ ID NO: 3290
  source 1..86: mol_type = other RNA
  modified_base 1: mod_base = OTHER; note = 2'-Omethyladenosine
  modified_base 2: mod_base = OTHER; note = 2'-Omethylcytosine
  modified_base 3: mod_base = OTHER; note = 2'-Omethylcytosine
  modified_base 4: mod_base = OTHER; note = 2'-Omethyladenosine
  modified_base 5: mod_base = OTHER; note = 2'-Omethylguanosine
  modified_base 6: mod_base = OTHER; note = 2'-Omethylguanosine
  modified_base 13: mod_base = OTHER; note = 2'-Omethylguanosine
  modified_base 14: mod_base = OTHER; note = 2'-Omethyladenosine
  modified_base 15: mod_base = OTHER; note = 2'-Omethylguanosine
  modified_base 16: mod_base = OTHER; note = 2'-Omethyluridine
  modified_base 17: mod_base = OTHER; note = 2'-Omethylguanosine
  modified_base 18: mod_base = OTHER; note = 2'-Omethylguanosine
  modified_base 19: mod_base = OTHER; note = Uridine phosphorothiorate
  modified_base 20: mod_base = OTHER; note = 2'-Omethyluridine
  modified_base 21: mod_base = OTHER; note = Adenosine phosphorothiorate
  modified_base 25: mod_base = OTHER; note = 2'-Omethylcytosine
  modified_base 33: mod_base = OTHER; note = Uridine phosphorothiorate
  modified_base 34: mod_base = OTHER; note = 2'-Omethyluridine
  modified_base 35: mod_base = OTHER; note = Cytosine phosphorothiorate
  modified_base 37: mod_base = OTHER; note = Guanosine phosphorothiorate
  modified_base 38: mod_base = OTHER; note = Adenosine phosphorothiorate
  modified_base 59: mod_base = OTHER; note = 2'-Omethylguanosine
  modified_base 60: mod_base = OTHER; note = 2'-Omethyluridine
  modified_base 62: mod_base = OTHER; note = 2'-Omethylguanosine
  modified_base 64: mod_base = OTHER; note = Uridine phosphorothiorate
  modified_base 65: mod_base = OTHER; note = Uridine phosphorothiorate
  modified_base 71: mod_base = OTHER; note = 2'-Omethylcytosine
  modified_base 75: mod_base = OTHER; note = 2'-Omethylcytosine
  modified_base 83: mod_base = OTHER; note = 2'-Omethyladenosine

SEQ ID NO: 9607 - RNA, 85 nt, synthetic construct; identical to SEQ ID NO: 3286
  source 1..85: mol_type = other RNA
  modified_base 1: mod_base = OTHER; note = 2'-Omethylcytosine
  modified_base 3: mod_base = OTHER; note = 2'-fluoroadenosine phosphorothiorate
  modified_base 12: mod_base = OTHER; note = Guanosine phosphorothiorate
  modified_base 14: mod_base = OTHER; note = 2'-fluoroguanosine phosphorothiorate
  modified_base 30: mod_base = OTHER; note = 2'-fluoroadenosine
  modified_base 34: mod_base = OTHER; note = 2'-fluorouridine
  modified_base 36: mod_base = OTHER; note = Guanosine phosphorothiorate
  modified_base 47: mod_base = OTHER; note = 2'-fluorocytosine phosphorothiorate
  modified_base 52: mod_base = OTHER; note = 2'-Omethylguanosine
  modified_base 54: mod_base = OTHER; note = 2'-Omethylcytosine
  modified_base 58: mod_base = OTHER; note = 2'-Omethylguanosine
  modified_base 69: mod_base = OTHER; note = 2'-Omethylcytosine
  modified_base 76: mod_base = OTHER; note = 2'-fluorocytosine
  modified_base 84: mod_base = OTHER; note = 2'-fluorocytosine

SEQ ID NO: 9608 - DNA, 76 bp, synthetic construct; identical to SEQ ID NO: 1924
  source 1..76: mol_type = other DNA
  modified_base 1: mod_base = OTHER; note = 2'-Omethylguanosine phosphorothiorate
  modified_base 2: mod_base = OTHER; note = 2'-Omethylguanosine phosphorothiorate
  modified_base 15: mod_base = OTHER; note = Adenosine phosphorothiorate
  modified_base 19: mod_base = OTHER; note = Adenosine phosphorothiorate
  modified_base 20: mod_base = OTHER; note = 2'-O-(2-Methoxyethyl) thymine
  modified_base 22: mod_base = OTHER; note = Guanosine phosphorothiorate
  modified_base 23: mod_base = OTHER; note = 2'-fluorocytosine
  modified_base 27: mod_base = OTHER; note = 2'-Omethyluridine
  modified_base 41: mod_base = OTHER; note = 2'-O-(2-Methoxyethyl) 5-methylcytosine
  modified_base 65: mod_base = OTHER; note = 2'-fluoroguanosine
  modified_base 74: mod_base = OTHER; note = Cytosine phosphorothiorate
  modified_base 75: mod_base = OTHER; note = 2'-Omethylcytosine phosphorothiorate
  modified_base 76: mod_base = OTHER; note = 2'-Omethyladenosine
  misc_feature 1..37: note = RNA
  misc_feature 38: note = DNA
  misc_feature 39..76: note = RNA

SEQ ID NO: 9609 - RNA, 76 nt, synthetic construct; identical to SEQ ID NO: 625
  source 1..76: mol_type = other RNA
  modified_base 1: mod_base = OTHER; note = 2'-Omethylguanosine phosphorothiorate
  modified_base 2: mod_base = OTHER; note = 2'-Omethylguanosine
  modified_base 3: mod_base = OTHER; note = 2'-Omethylcytosine
  modified_base 10: mod_base = OTHER; note = 2'-Omethylguanosine
  modified_base 11: mod_base = OTHER; note = 2'-Omethylcytosine
  modified_base 12: mod_base = OTHER; note = 2'-Omethylguanosine
  modified_base 13: mod_base = OTHER; note = 2'-Omethylcytosine
  modified_base 14: mod_base = OTHER; note = 2'-Omethyladenosine
  modified_base 15: mod_base = OTHER; note = 2'-fluoroadenosine
  modified_base 16: mod_base = OTHER; note = 2'-Omethyluridine
  modified_base 17: mod_base = OTHER; note = 2'-Omethylguanosine
  modified_base 18: mod_base = OTHER; note = 2'-Omethylguanosine
  modified_base 19: mod_base = OTHER; note = 2'-fluoroadenosine
  modified_base 20: mod_base = OTHER; note = 2'-Omethyluridine
  modified_base 22: mod_base = OTHER; note = 2'-Omethylguanosine
  modified_base 23: mod_base = OTHER; note = 2'-Omethylcytosine
  modified_base 24: mod_base = OTHER; note = 2'-Omethylguanosine
  modified_base 25: mod_base = OTHER; note = 2'-Omethylcytosine
  modified_base 38: mod_base = OTHER; note = Adenosine phosphorothiorate
  modified_base 39: mod_base = OTHER; note = Uridine phosphorothiorate
  modified_base 40: mod_base = OTHER; note = 2'-fluorouridine
  modified_base 43: mod_base = OTHER; note = 2'-Omethyladenosine
  modified_base 44: mod_base = OTHER; note = 2'-Omethyladenosine
  modified_base 45: mod_base = OTHER; note = 2'-Omethylguanosine
  modified_base 46: mod_base = OTHER; note = 2'-fluoroguanosine
  modified_base 48: mod_base = OTHER; note = 2'-fluorouridine
  modified_base 49: mod_base = OTHER; note = 2'-Omethylcytosine
  modified_base 50: mod_base = OTHER; note = 2'-Omethylcytosine
  modified_base 54: mod_base = OTHER; note = 2'-Omethyluridine phosphorothiorate
  modified_base 55: mod_base = OTHER; note = Uridine phosphorothiorate
  modified_base 56: mod_base = OTHER; note = 2'-Omethylcytosine
  modified_base 57: mod_base = OTHER; note = 2'-fluoroguanosine
  modified_base 61: mod_base = OTHER; note = 2'-Omethylcytosine
  modified_base 62: mod_base = OTHER; note = 2'-Omethylcytosine
  modified_base 63: mod_base = OTHER; note = 2'-fluorocytosine
  modified_base 64: mod_base = OTHER; note = 2'-Omethylguanosine
  modified_base 65: mod_base = OTHER; note = 2'-Omethylguanosine
  modified_base 66: mod_base = OTHER; note = 2'-Omethylcytosine
  modified_base 67: mod_base = OTHER; note = 2'-Omethylguanosine
  modified_base 68: mod_base = OTHER; note = 2'-Omethylguanosine
  modified_base 69: mod_base = OTHER; note = 2'-Omethyladenosine

SEQ ID NO: 9610 - RNA, 76 nt, synthetic construct; identical to SEQ ID NO: 625
  source 1..76: mol_type = other RNA
  modified_base 1: mod_base = OTHER; note = 2'-Omethylguanosine phosphorothiorate
  modified_base 2: mod_base = OTHER; note = 2'-Omethylguanosine
  modified_base 3: mod_base = OTHER; note = 2'-Omethylcytosine
  modified_base 4: mod_base = OTHER; note = 2'-Omethyluridine
  modified_base 5: mod_base = OTHER; note = 2'-Omethylcytosine
  modified_base 6: mod_base = OTHER; note = 2'-Omethylcytosine
  modified_base 10: mod_base = OTHER; note = 2'-Omethylguanosine
  modified_base 11: mod_base = OTHER; note = 2'-Omethylcytosine
  modified_base 12: mod_base = OTHER; note = 2'-Omethylguanosine
  modified_base 13: mod_base = OTHER; note = 2'-Omethylcytosine
  modified_base 17: mod_base = OTHER; note = 2'-Omethylguanosine
  modified_base 18: mod_base = OTHER; note = 2'-Omethylguanosine
  modified_base 19: mod_base = OTHER; note = Adenosine phosphorothiorate
  modified_base 20: mod_base = OTHER; note = 2'-Omethyluridine
  modified_base 22: mod_base = OTHER; note = 2'-Omethylguanosine
  modified_base 23: mod_base = OTHER; note = 2'-Omethylcytosine
  modified_base 24: mod_base = OTHER; note = 2'-Omethylguanosine
  modified_base 25: mod_base = OTHER; note = 2'-Omethylcytosine
  modified_base 29: mod_base = OTHER; note = 2'-Omethylguanosine
  modified_base 33: mod_base = OTHER; note = 2'-fluorouridine
  modified_base 35: mod_base = OTHER; note = Cytosine phosphorothiorate
  modified_base 37: mod_base = OTHER; note = Adenosine phosphorothiorate
  modified_base 38: mod_base = OTHER; note = Adenosine phosphorothiorate
  modified_base 40: mod_base = OTHER; note = 2'-fluorouridine
  modified_base 41: mod_base = OTHER; note = 2'-Omethylcytosine
  modified_base 42: mod_base = OTHER; note = 2'-Omethyladenosine
  modified_base 43: mod_base = OTHER; note = 2'-Omethyladenosine
  modified_base 44: mod_base = OTHER; note = 2'-fluoroadenosine
  modified_base 46: mod_base = OTHER; note = Guanosine phosphorothiorate
  modified_base 48: mod_base = OTHER; note = 2'-fluorouridine
  modified_base 49: mod_base = OTHER; note = 2'-Omethylcytosine
  modified_base 50: mod_base = OTHER; note = 2'-Omethylcytosine
  modified_base 51: mod_base = OTHER; note = 2'-Omethylguanosine
  modified_base 52: mod_base = OTHER; note = 2'-Omethylguanosine
  modified_base 53: mod_base = OTHER; note = 2'-Omethylguanosine
  modified_base 54: mod_base = OTHER; note = 2'-Omethyluridine phosphorothiorate
  modified_base 55: mod_base = OTHER; note = Uridine phosphorothiorate
  modified_base 56: mod_base = OTHER; note = 2'-Omethylcytosine
  modified_base 57: mod_base = OTHER; note = 2'-fluoroguanosine
  modified_base 59: mod_base = OTHER; note = 2'-Omethylguanosine
  modified_base 61: mod_base = OTHER; note = 2'-Omethylcytosine
  modified_base 62: mod_base = OTHER; note = 2'-Omethylcytosine
  modified_base 63: mod_base = OTHER; note = 2'-fluorocytosine
  modified_base 64: mod_base = OTHER; note = 2'-Omethylguanosine
  modified_base 65: mod_base = OTHER; note = 2'-Omethylguanosine
  modified_base 66: mod_base = OTHER; note = 2'-Omethylcytosine
  modified_base 67: mod_base = OTHER; note = 2'-Omethylguanosine
  modified_base 68: mod_base = OTHER; note = 2'-Omethylguanosine
  modified_base 71: mod_base = OTHER; note = 2'-Omethyluridine
  modified_base 73: mod_base = OTHER; note = 2'-Omethylguanosine
  modified_base 75: mod_base = OTHER; note = 2'-fluorocytosine phosphorothiorate

SEQ ID NO: 9611 - RNA, 76 nt, synthetic construct; identical to SEQ ID NO: 3289
  source 1..76: mol_type = other RNA
  modified_base 1: mod_base = OTHER; note = 2'-Omethylguanosine
  modified_base 2: mod_base = OTHER; note = 2'-Omethylcytosine
  modified_base 3: mod_base = OTHER; note = 2'-Omethylcytosine
  modified_base 4: mod_base = OTHER; note = 2'-Omethyluridine
  modified_base 5: mod_base = OTHER; note = 2'-Omethylguanosine
  modified_base 6: mod_base = OTHER; note = 2'-Omethylguanosine
  modified_base 16: mod_base = OTHER; note = 2'-Omethyluridine
  modified_base 18: mod_base = OTHER; note = 2'-Omethylguanosine
  modified_base 19: mod_base = OTHER; note = 2'-Omethylguanosine
  modified_base 25: mod_base = OTHER; note = 2'-Omethylcytosine
  modified_base 33: mod_base = OTHER; note = 2'-fluorouridine
  modified_base 35: mod_base = OTHER; note = Uridine phosphorothiorate
  modified_base 37: mod_base = OTHER; note = Adenosine phosphorothiorate
  modified_base 38: mod_base = OTHER; note = Adenosine phosphorothiorate
  modified_base 41: mod_base = OTHER; note = 2'-fluorouridine
  modified_base 42: mod_base = OTHER; note = 2'-Omethylguanosine
  modified_base 43: mod_base = OTHER; note = 2'-Omethyladenosine
  modified_base 44: mod_base = OTHER; note = 2'-fluoroguanosine
  modified_base 49: mod_base = OTHER; note = 2'-Omethylcytosine
  modified_base 50: mod_base = OTHER; note = 2'-Omethyladenosine
  modified_base 52: mod_base = OTHER; note = 2'-Omethylguanosine
  modified_base 54: mod_base = OTHER; note = 2'-Omethyluridine
  modified_base 55: mod_base = OTHER; note = Uridine phosphorothiorate
  modified_base 56: mod_base = OTHER; note = 2'-Omethylcytosine
  modified_base 57: mod_base = OTHER; note = 2'-fluoroadenosine
  modified_base 59: mod_base = OTHER; note = 2'-Omethylguanosine
  modified_base 61: mod_base = OTHER; note = 2'-Omethylcytosine
  modified_base 62: mod_base = OTHER; note = 2'-Omethylcytosine
  modified_base 63: mod_base = OTHER; note = 2'-fluorocytosine
  modified_base 64: mod_base = OTHER; note = 2'-Omethyluridine
  modified_base 65: mod_base = OTHER; note = 2'-Omethylguanosine
  modified_base 73: mod_base = OTHER; note = 2'-Omethylguanosine

SEQ ID NO: 9612 - RNA, 76 nt, synthetic construct; identical to SEQ ID NO: 625
  source 1..76: mol_type = other RNA
  modified_base 1: mod_base = OTHER; note = 2'-Omethylguanosine phosphorothiorate
  modified_base 2: mod_base = OTHER; note = 2'-Omethylguanosine phosphorothiorate
  modified_base 3: mod_base = OTHER; note = 2'-Omethylcytosine phosphorothiorate
  modified_base 4: mod_base = OTHER; note = 2'-Omethyluridine phosphorothiorate
  modified_base 5: mod_base = OTHER; note = 2'-Omethylcytosine phosphorothiorate
  modified_base 6: mod_base = OTHER; note = 2'-Omethylcytosine phosphorothiorate
  modified_base 22: mod_base = OTHER; note = 2'-Omethylguanosine
  modified_base 23: mod_base = OTHER; note = 2'-Omethylcytosine
  modified_base 24: mod_base = OTHER; note = 2'-Omethylguanosine
  modified_base 25: mod_base = OTHER; note = 2'-Omethylcytosine
  modified_base 40: mod_base = OTHER; note = 2'-fluorouridine
  modified_base 41: mod_base = OTHER; note = 2'-fluorocytosine
  modified_base 42: mod_base = OTHER; note = 2'-fluoroadenosine
  modified_base 43: mod_base = OTHER; note = 2'-fluoroadenosine
  modified_base 54: mod_base = OTHER; note = Uridine phosphorothiorate
  modified_base 55: mod_base = OTHER; note = Uridine phosphorothiorate
  modified_base 56: mod_base = OTHER; note = Cytosine phosphorothiorate
  modified_base 57: mod_base = OTHER; note = Guanosine phosphorothiorate

SEQ ID NO: 9613 - RNA, 73 nt, synthetic construct; identical to SEQ ID NO: 935
  source 1..73: mol_type = other RNA
  modified_base 1: mod_base = OTHER; note = 2'-Omethylguanosine phosphorothiorate
  modified_base 2: mod_base = OTHER; note = 2'-Omethylguanosine
  modified_base 19: mod_base = OTHER; note = 2'-fluoroadenosine
  modified_base 28: mod_base = OTHER; note = 2'-fluorouridine
  modified_base 52: mod_base = OTHER; note = 2'-fluoroguanosine
  modified_base 73: mod_base = OTHER; note = 2'-Omethylguanosine

SEQ ID NO: 9614 - RNA, 76 nt, synthetic construct; identical to SEQ ID NO: 625
  source 1..76: mol_type = other RNA
  modified_base 1: mod_base = OTHER; note = 2'-fluoroguanosine phosphorothiorate
  modified_base 3: mod_base = OTHER; note = 2'-Omethylcytosine phosphorothiorate
  modified_base 4: mod_base = OTHER; note = 2'-fluorouridine
  modified_base 5: mod_base = OTHER; note = 2'-fluorocytosine
  modified_base 11: mod_base = OTHER; note = Cytosine phosphorothiorate
  modified_base 12: mod_base = OTHER; note = 2'-Omethylguanosine
  modified_base 13: mod_base = OTHER; note = 2'-Omethylcytosine
  modified_base 15: mod_base = OTHER; note = Adenosine phosphorothiorate
  modified_base 17: mod_base = OTHER; note = Guanosine phosphorothiorate
  modified_base 18: mod_base = OTHER; note = 2'-fluoroguanosine
  modified_base 20: mod_base = OTHER; note = 2'-fluorouridine phosphorothiorate
  modified_base 25: mod_base = OTHER; note = 2'-Omethylcytosine
  modified_base 34: mod_base = OTHER; note = Uridine phosphorothiorate
  modified_base 42: mod_base = OTHER; note = 2'-Omethyladenosine phosphorothiorate
  modified_base 43: mod_base = OTHER; note = 2'-Omethyladenosine
  modified_base 45: mod_base = OTHER; note = 2'-Omethylguanosine
  modified_base 46: mod_base = OTHER; note = Guanosine phosphorothiorate
  modified_base 47: mod_base = OTHER; note = 2'-Omethyluridine
  modified_base 49: mod_base = OTHER; note = 2'-Omethylcytosine
  modified_base 50: mod_base = OTHER; note = 2'-fluorocytosine
  modified_base 52: mod_base = OTHER; note = 2'-Omethylguanosine phosphorothiorate
  modified_base 54: mod_base = OTHER; note = 2'-Omethyluridine
  modified_base 57: mod_base = OTHER; note = 2'-fluoroguanosine
  modified_base 59: mod_base = OTHER; note = Guanosine phosphorothiorate
  modified_base 60: mod_base = OTHER; note = Uridine phosphorothiorate
  modified_base 61: mod_base = OTHER; note = 2'-Omethylcytosine
  modified_base 62: mod_base = OTHER; note = 2'-Omethylcytosine
  modified_base 63: mod_base = OTHER; note = 2'-fluorocytosine
  modified_base 64: mod_base = OTHER; note = Guanosine phosphorothiorate
  modified_base 65: mod_base = OTHER; note = 2'-fluoroguanosine
  modified_base 67: mod_base = OTHER; note = 2'-Omethylguanosine
  modified_base 70: mod_base = OTHER; note = Guanosine phosphorothiorate
  modified_base 71: mod_base = OTHER; note = 2'-fluorouridine
  modified_base 72: mod_base = OTHER; note = 2'-Omethylcytosine
  modified_base 73: mod_base = OTHER; note = 2'-Omethylguanosine
  modified_base 75: mod_base = OTHER; note = 2'-fluorocytosine
  modified_base 76: mod_base = OTHER; note = 2'-Omethyladenosine

SEQ ID NO: 9615 - RNA, 76 nt, synthetic construct; identical to SEQ ID NO: 625
  source 1..76: mol_type = other RNA
  modified_base 1: mod_base = OTHER; note = 2'-Omethylguanosine phosphorothiorate
  modified_base 2: mod_base = OTHER; note = 2'-Omethylguanosine
  modified_base 3: mod_base = OTHER; note = 2'-Omethylcytosine
  modified_base 4: mod_base = OTHER; note = 2'-Omethyluridine
  modified_base 5: mod_base = OTHER; note = 2'-Omethylcytosine
  modified_base 6: mod_base = OTHER; note = 2'-Omethylcytosine
  modified_base 10: mod_base = OTHER; note = 2'-Omethylguanosine
  modified_base 11: mod_base = OTHER; note = 2'-Omethylcytosine
  modified_base 12: mod_base = OTHER; note = 2'-Omethylguanosine
  modified_base 13: mod_base = OTHER; note = 2'-Omethylcytosine
  modified_base 49: mod_base = OTHER; note = 2'-Omethylcytosine
  modified_base 50: mod_base = OTHER; note = 2'-Omethylcytosine
  modified_base 51: mod_base = OTHER; note = 2'-Omethylguanosine
  modified_base 52: mod_base = OTHER; note = 2'-Omethylguanosine
  modified_base 53: mod_base = OTHER; note = 2'-Omethylguanosine
  modified_base 61: mod_base = OTHER; note = 2'-Omethylcytosine
  modified_base 62: mod_base = OTHER; note = 2'-Omethylcytosine
  modified_base 63: mod_base = OTHER; note = 2'-fluorocytosine
  modified_base 64: mod_base = OTHER; note = 2'-Omethylguanosine
  modified_base 65: mod_base = OTHER; note = 2'-Omethylguanosine
  modified_base 66: mod_base = OTHER; note = 2'-Omethylcytosine
  modified_base 67: mod_base = OTHER; note = 2'-Omethylguanosine
  modified_base 68: mod_base = OTHER; note = 2'-Omethylguanosine
  modified_base 69: mod_base = OTHER; note = 2'-Omethyladenosine

SEQ ID NO: 9616 - RNA, 76 nt, synthetic construct; identical to SEQ ID NO: 625
  source 1..76: mol_type = other RNA
  modified_base 1: mod_base = OTHER; note = 2'-Omethylguanosine
  modified_base 2: mod_base = OTHER; note = 2'-Omethylguanosine
  modified_base 3: mod_base = OTHER; note = 2'-Omethylcytosine
  modified_base 4: mod_base = OTHER; note = 2'-Omethyluridine
  modified_base 5: mod_base = OTHER; note = 2'-Omethylcytosine
  modified_base 6: mod_base = OTHER; note = 2'-Omethylcytosine
  modified_base 10: mod_base = OTHER; note = 2'-Omethylguanosine
  modified_base 11: mod_base = OTHER; note = 2'-Omethylcytosine
  modified_base 12: mod_base = OTHER; note = 2'-Omethylguanosine phosphorothiorate
  modified_base 14: mod_base = OTHER; note = 2'-Omethyladenosine
  modified_base 16: mod_base = OTHER; note = Uridine phosphorothiorate
  modified_base 17: mod_base = OTHER; note = Guanosine phosphorothiorate
  modified_base 18: mod_base = OTHER; note = 2'-fluoroguanosine phosphorothiorate
  modified_base 19: mod_base = OTHER; note = 2'-fluoroadenosine phosphorothiorate
  modified_base 21: mod_base = OTHER; note = 2'-fluoroadenosine phosphorothiorate
  modified_base 22: mod_base = OTHER; note = 2'-Omethylguanosine
  modified_base 23: mod_base = OTHER; note = 2'-Omethylcytosine
  modified_base 24: mod_base = OTHER; note = 2'-Omethylguanosine
  modified_base 25: mod_base = OTHER; note = 2'-Omethylcytosine
  modified_base 26: mod_base = OTHER; note = Adenosine phosphorothiorate
  modified_base 28: mod_base = OTHER; note = 2'-Omethyluridine phosphorothiorate
  modified_base 29: mod_base = OTHER; note = 2'-fluoroguanosine phosphorothiorate
  modified_base 30: mod_base = OTHER; note = 2'-Omethylguanosine
  modified_base 33: mod_base = OTHER; note = 2'-fluorouridine
  modified_base 34: mod_base = OTHER; note = 2'-Omethyluridine phosphorothiorate
  modified_base 35: mod_base = OTHER; note = 2'-Omethylcytosine phosphorothiorate
  modified_base 37: mod_base = OTHER; note = Adenosine phosphorothiorate
  modified_base 38: mod_base = OTHER; note = Adenosine phosphorothiorate
  modified_base 40: mod_base = OTHER; note = 2'-Omethyluridine
  modified_base 41: mod_base = OTHER; note = 2'-Omethylcytosine
  modified_base 42: mod_base = OTHER; note = Adenosine phosphorothiorate
  modified_base 44: mod_base = OTHER; note = 2'-Omethyladenosine
  modified_base 46: mod_base = OTHER; note = 2'-Omethylguanosine phosphorothiorate
  modified_base 48: mod_base = OTHER; note = 2'-Omethyluridine phosphorothiorate
  modified_base 49: mod_base = OTHER; note = 2'-Omethylcytosine
  modified_base 50: mod_base = OTHER; note = 2'-Omethylcytosine
  modified_base 52: mod_base = OTHER; note = 2'-Omethylguanosine
  modified_base 53: mod_base = OTHER; note = 2'-Omethylguanosine
  modified_base 55: mod_base = OTHER; note = Uridine phosphorothiorate
  modified_base 56: mod_base = OTHER; note = Cytosine phosphorothiorate
  modified_base 57: mod_base = OTHER; note = 2'-Omethylguanosine
  modified_base 59: mod_base = OTHER; note = 2'-Omethylguanosine
  modified_base 61: mod_base = OTHER; note = 2'-Omethylcytosine phosphorothiorate
  modified_base 62: mod_base = OTHER; note = 2'-Omethylcytosine
  modified_base 63: mod_base = OTHER; note = 2'-fluorocytosine
  modified_base 64: mod_base = OTHER; note = 2'-Omethylguanosine
  modified_base 65: mod_base = OTHER; note = 2'-Omethylguanosine
  modified_base 66: mod_base = OTHER; note = 2'-Omethylcytosine
  modified_base 67: mod_base = OTHER; note = 2'-Omethylguanosine phosphorothiorate
  modified_base 68: mod_base = OTHER; note = 2'-Omethylguanosine
  modified_base 69: mod_base = OTHER; note = 2'-fluoroadenosine phosphorothiorate
  modified_base 70: mod_base = OTHER; note = 2'-fluoroguanosine phosphorothiorate
  modified_base 72: mod_base = OTHER; note = 2'-Omethylcytosine
  modified_base 73: mod_base = OTHER; note = 2'-Omethylguanosine
  modified_base 74: mod_base = OTHER; note = 2'-fluorocytosine phosphorothiorate
  modified_base 75: mod_base = OTHER; note = 2'-Omethylcytosine
  modified_base 76: mod_base = OTHER; note = 2'-fluoroadenosine

SEQ ID NO: 9617 - RNA, 74 nt, synthetic construct; identical to SEQ ID NO: 766
  source 1..74: mol_type = other RNA
  modified_base 1: mod_base = OTHER; note = 2'-Omethylguanosine phosphorothiorate
  modified_base 2: mod_base = OTHER; note = 2'-Omethylguanosine
  modified_base 22: mod_base = OTHER; note = 2'-Omethylguanosine
  modified_base 52: mod_base = OTHER; note = 2'-Omethylguanosine
  modified_base 73: mod_base = OTHER; note = 2'-Omethylguanosine

SEQ ID NO: 9618 - RNA, 85 nt, synthetic construct; identical to SEQ ID NO: 3310
  source 1..85: mol_type = other RNA
  modified_base 1: mod_base = OTHER; note = 2'-Omethylcytosine
  modified_base 12: mod_base = OTHER; note = Guanosine phosphorothiorate
  modified_base 15: mod_base = OTHER; note = Uridine phosphorothiorate
  modified_base 26: mod_base = OTHER; note = 2'-Omethyluridine
  modified_base 30: mod_base = OTHER; note = 2'-fluoroadenosine
  modified_base 34: mod_base = OTHER; note = 2'-fluorouridine
  modified_base 51: mod_base = OTHER; note = 2'-Omethyluridine
  modified_base 57: mod_base = OTHER; note = 2'-Omethylcytosine
  modified_base 60: mod_base = OTHER; note = Guanosine phosphorothiorate
  modified_base 73: mod_base = OTHER; note = Adenosine phosphorothiorate
  modified_base 83: mod_base = OTHER; note = Cytosine phosphorothiorate
  modified_base 84: mod_base = OTHER; note = 2'-Omethylcytosine

SEQ ID NO: 9619 - RNA, 76 nt, synthetic construct; identical to SEQ ID NO: 625
  source 1..76: mol_type = other RNA
  modified_base 33: mod_base = OTHER; note = Thymine
  modified_base 34: mod_base = OTHER; note = Thymine

SEQ ID NO: 9620 - RNA, 75 nt, synthetic construct; identical to SEQ ID NO: 1045
  source 1..75: mol_type = other RNA
  modified_base 1: mod_base = OTHER; note = Guanosine phosphorothiorate
  modified_base 2: mod_base = OTHER; note = Guanosine phosphorothiorate
  modified_base 3: mod_base = OTHER; note = Uridine phosphorothiorate
  modified_base 49: mod_base = OTHER; note = Cytosine phosphorothiorate
  modified_base 50: mod_base = OTHER; note = Guanosine phosphorothiorate
  modified_base 62: mod_base = OTHER; note = Cytosine phosphorothiorate
  modified_base 63: mod_base = OTHER; note = Guanosine phosphorothiorate
  modified_base 64: mod_base = OTHER; note = Guanosine phosphorothiorate
  modified_base 65: mod_base = OTHER; note = Uridine phosphorothiorate
  modified_base 66: mod_base = OTHER; note = Guanosine phosphorothiorate
  modified_base 68: mod_base = OTHER; note = Adenosine phosphorothiorate
  modified_base 69: mod_base = OTHER; note = Adenosine phosphorothiorate
  modified_base 73: mod_base = OTHER; note = Cytosine phosphorothiorate
  modified_base 74: mod_base = OTHER; note = Cytosine phosphorothiorate

SEQ ID NO: 9621 - DNA, 74 bp, synthetic construct; identical to SEQ ID NO: 3384
  source 1..74: mol_type = other DNA
  modified_base 1: mod_base = OTHER; note = 2'-Omethylguanosine phosphorothiorate
  modified_base 2: mod_base = OTHER; note = 2'-Omethylguanosine
  modified_base 12: mod_base = OTHER; note = Guanosine phosphorothiorate
  modified_base 13: mod_base = OTHER; note = 2'-fluorocytosine
  modified_base 25: mod_base = OTHER; note = Cytosine phosphorothiorate
  modified_base 44: mod_base = OTHER; note = Adenosine phosphorothiorate
  modified_base 45: mod_base = OTHER; note = 2'-O-(2-Methoxyethyl) guanosine
  modified_base 51: mod_base = OTHER; note = Guanosine phosphorothiorate
  modified_base 73: mod_base = OTHER; note = 2'-Omethylguanosine
  misc_feature 1..51: note = RNA
  misc_feature 52: note = DNA
  misc_feature 53..71: note = RNA
  misc_feature 72: note = DNA
  misc_feature 73..74: note = RNA

SEQ ID NO: 9622 - RNA, 85 nt, synthetic construct; identical to SEQ ID NO: 3317
  source 1..85: mol_type = other RNA
  modified_base 1: mod_base = OTHER; note = 2'-Omethylguanosine phosphorothiorate
  modified_base 14: mod_base = OTHER; note = 2'-Omethyladenosine phosphorothiorate
  modified_base 16: mod_base = OTHER; note = 2'-Omethyluridine
  modified_base 41: mod_base = OTHER; note = 2'-fluorocytosine phosphorothiorate
  modified_base 44: mod_base = OTHER; note = 2'-Omethyluridine phosphorothiorate
  modified_base 50: mod_base = OTHER; note = 2'-Omethylcytosine
  modified_base 62: mod_base = OTHER; note = 2'-fluoroguanosine
  modified_base 82: mod_base = OTHER; note = 2'-Omethylguanosine

SEQ ID NO: 9623 - RNA, 85 nt, synthetic construct; identical to SEQ ID NO: 3317
  source 1..85: mol_type = other RNA
  modified_base 1: mod_base = OTHER; note = 2'-Omethylguanosine phosphorothiorate
  modified_base 2: mod_base = OTHER; note = 2'-Omethylcytosine
  modified_base 18: mod_base = OTHER; note = 2'-Omethylguanosine
  modified_base 33: mod_base = OTHER; note = 2'-fluorouridine
  modified_base 34: mod_base = OTHER; note = 2'-fluorocytosine phosphorothiorate
  modified_base 44: mod_base = OTHER; note = 2'-fluorouridine
  modified_base 46: mod_base = OTHER; note = 2'-Omethylguanosine
  modified_base 55: mod_base = OTHER; note = 2'-fluorocytosine
  modified_base 59: mod_base = OTHER; note = 2'-Omethylcytosine phosphorothiorate
  modified_base 66: mod_base = OTHER; note = 2'-fluoroguanosine phosphorothiorate

SEQ ID NO: 9624 - RNA, 76 nt, synthetic construct; identical to SEQ ID NO: 625
  source 1..76: mol_type = other RNA
  modified_base 1: mod_base = OTHER; note = 2'-Omethylguanosine phosphorothiorate
  modified_base 2: mod_base = OTHER; note = 2'-Omethylguanosine phosphorothiorate
  modified_base 3: mod_base = OTHER; note = 2'-Omethylcytosine
  modified_base 4: mod_base = OTHER; note = 2'-Omethyluridine
  modified_base 5: mod_base = OTHER; note = 2'-Omethylcytosine
  modified_base 6: mod_base = OTHER; note = 2'-Omethylcytosine
  modified_base 10: mod_base = OTHER; note = 2'-Omethylguanosine
  modified_base 11: mod_base = OTHER; note = 2'-Omethylcytosine
  modified_base 12: mod_base = OTHER; note = 2'-Omethylguanosine
  modified_base 13: mod_base = OTHER; note = 2'-Omethylcytosine
  modified_base 14: mod_base = OTHER; note = 2'-Omethyladenosine
  modified_base 15: mod_base = OTHER; note = 2'-Omethyladenosine
  modified_base 16: mod_base = OTHER; note = 2'-Omethyluridine
  modified_base 17: mod_base = OTHER; note = 2'-Omethylguanosine
  modified_base 18: mod_base = OTHER; note = 2'-Omethylguanosine
  modified_base 19: mod_base = OTHER; note = 2'-Omethyladenosine
  modified_base 20: mod_base = OTHER; note = 2'-Omethyluridine
  modified_base 22: mod_base = OTHER; note = 2'-Omethylguanosine
  modified_base 23: mod_base = OTHER; note = 2'-Omethylcytosine
  modified_base 24: mod_base = OTHER; note = 2'-Omethylguanosine
  modified_base 25: mod_base = OTHER; note = 2'-Omethylcytosine
  modified_base 44: mod_base = OTHER; note = 2'-Omethyladenosine
  modified_base 45: mod_base = OTHER; note = 2'-Omethylguanosine
  modified_base 46: mod_base = OTHER; note = 2'-Omethylguanosine
  modified_base 48: mod_base = OTHER; note = 2'-fluorouridine
  modified_base 49: mod_base = OTHER; note = 2'-Omethylcytosine
  modified_base 50: mod_base = OTHER; note = 2'-Omethylcytosine
  modified_base 51: mod_base = OTHER; note = 2'-Omethylguanosine
  modified_base 52: mod_base = OTHER; note = 2'-Omethylguanosine
  modified_base 53: mod_base = OTHER; note = 2'-Omethylguanosine
  modified_base 54: mod_base = OTHER; note = 2'-Omethyluridine
  modified_base 61: mod_base = OTHER; note = 2'-Omethylcytosine
  modified_base 62: mod_base = OTHER; note = 2'-Omethylcytosine
  modified_base 63: mod_base = OTHER; note = 2'-fluorocytosine
  modified_base 64: mod_base = OTHER; note = 2'-Omethylguanosine
  modified_base 65: mod_base = OTHER; note = 2'-Omethylguanosine
  modified_base 66: mod_base = OTHER; note = 2'-Omethylcytosine
  modified_base 67: mod_base = OTHER; note = 2'-Omethylguanosine
  modified_base 68: mod_base = OTHER; note = 2'-Omethylguanosine
  modified_base 73: mod_base = OTHER; note = 2'-Omethylguanosine

SEQ ID NO: 9625 - DNA, 73 bp, synthetic construct; identical to SEQ ID NO: 3380
  source 1..73: mol_type = other DNA
  modified_base 1: mod_base = OTHER; note = 2'-Omethylguanosine phosphorothiorate
  modified_base 2: mod_base = OTHER; note = 2'-Omethylguanosine
  modified_base 12: mod_base = OTHER; note = Guanosine phosphorothiorate
  modified_base 13: mod_base = OTHER; note = 2'-fluorocytosine
  modified_base 25: mod_base = OTHER; note = Cytosine phosphorothiorate
  modified_base 44: mod_base = OTHER; note = Adenosine phosphorothiorate
  modified_base 45: mod_base = OTHER; note = 2'-O-(2-Methoxyethyl) guanosine
  modified_base 51: mod_base = OTHER; note = Guanosine phosphorothiorate
  misc_feature 1..51: note = RNA
  misc_feature 52: note = DNA
  misc_feature 53..73: note = RNA

SEQ ID NO: 9626 - RNA, 85 nt, synthetic construct; identical to SEQ ID NO: 3297
  source 1..85: mol_type = other RNA
  modified_base 1: mod_base = OTHER; note = 2'-Omethylguanosine
  modified_base 9: mod_base = OTHER; note = Guanosine phosphorothiorate
  modified_base 10: mod_base = OTHER; note = 2'-Omethylguanosine
  modified_base 13: mod_base = OTHER; note = 2'-Omethylguanosine
  modified_base 17: mod_base = OTHER; note = Guanosine phosphorothiorate
  modified_base 18: mod_base = OTHER; note = 2'-Omethylguanosine
  modified_base 19: mod_base = OTHER; note = Uridine phosphorothiorate
  modified_base 20: mod_base = OTHER; note = 2'-Omethyluridine
  modified_base 25: mod_base = OTHER; note = 2'-Omethylcytosine
  modified_base 29: mod_base = OTHER; note = 2'-Omethylguanosine
  modified_base 33: mod_base = OTHER; note = 2'-fluorouridine
  modified_base 35: mod_base = OTHER; note = Cytosine phosphorothiorate
  modified_base 37: mod_base = OTHER; note = Adenosine phosphorothiorate
  modified_base 38: mod_base = OTHER; note = Adenosine phosphorothiorate
  modified_base 41: mod_base = OTHER; note = 2'-fluorocytosine
  modified_base 43: mod_base = OTHER; note = 2'-Omethyladenosine
  modified_base 44: mod_base = OTHER; note = 2'-fluorouridine
  modified_base 56: mod_base = OTHER; note = Guanosine phosphorothiorate
  modified_base 59: mod_base = OTHER; note = 2'-Omethylcytosine
  modified_base 61: mod_base = OTHER; note = 2'-Omethylguanosine
  modified_base 63: mod_base = OTHER; note = Uridine phosphorothiorate
  modified_base 64: mod_base = OTHER; note = Uridine phosphorothiorate
  modified_base 65: mod_base = OTHER; note = 2'-Omethylcytosine
  modified_base 66: mod_base = OTHER; note = Guanosine phosphorothiorate
  modified_base 71: mod_base = OTHER; note = 2'-Omethylcytosine
  modified_base 72: mod_base = OTHER; note = 2'-fluorouridine
  modified_base 74: mod_base = OTHER; note = 2'-Omethylcytosine
  modified_base 80: mod_base = OTHER; note = 2'-Omethylguanosine
  modified_base 82: mod_base = OTHER; note = 2'-Omethylguanosine

SEQ ID NO: 9627 - RNA, 76 nt, synthetic construct; identical to SEQ ID NO: 3318
  source 1..76: mol_type = other RNA
  modified_base 1: mod_base = OTHER; note = 2'-Omethylcytosine
  modified_base 50: mod_base = OTHER; note = 2'-Omethylcytosine
  modified_base 52: mod_base = OTHER; note = 2'-Omethylguanosine
  modified_base 73: mod_base = OTHER; note = 2'-Omethyladenosine

SEQ ID NO: 9628 - RNA, 76 nt, synthetic construct; identical to SEQ ID NO: 625
  source 1..76: mol_type = other RNA
  modified_base 1: mod_base = OTHER; note = 2'-Omethylguanosine
  modified_base 3: mod_base = OTHER; note = 2'-fluorocytosine phosphorothiorate
  modified_base 4: mod_base = OTHER; note = 2'-fluorouridine
  modified_base 11: mod_base = OTHER; note = 2'-fluorocytosine
  modified_base 14: mod_base = OTHER; note = 2'-fluoroadenosine
  modified_base 15: mod_base = OTHER; note = 2'-Omethyladenosine phosphorothiorate
  modified_base 16: mod_base = OTHER; note = 2'-fluorouridine
  modified_base 17: mod_base = OTHER; note = 2'-Omethylguanosine
  modified_base 18: mod_base = OTHER; note = 2'-Omethylguanosine
  modified_base 20: mod_base = OTHER; note = Uridine phosphorothiorate
  modified_base 24: mod_base = OTHER; note = 2'-Omethylguanosine
  modified_base 29: mod_base = OTHER; note = 2'-fluoroguanosine
  modified_base 31: mod_base = OTHER; note = 2'-Omethyladenosine
  modified_base 32: mod_base = OTHER; note = 2'-fluorocytosine
  modified_base 33: mod_base = OTHER; note = 2'-fluorouridine
  modified_base 34: mod_base = OTHER; note = 2'-fluorouridine
  modified_base 38: mod_base = OTHER; note = 2'-Omethyladenosine
  modified_base 39: mod_base = OTHER; note = 2'-fluorouridine
  modified_base 40: mod_base = OTHER; note = Uridine phosphorothiorate
  modified_base 41: mod_base = OTHER; note = 2'-Omethylcytosine
  modified_base 43: mod_base = OTHER; note = Adenosine phosphorothiorate
  modified_base 44: mod_base = OTHER; note = 2'-Omethyladenosine
  modified_base 45: mod_base = OTHER; note = 2'-fluoroguanosine
  modified_base 47: mod_base = OTHER; note = Uridine phosphorothiorate
  modified_base 48: mod_base = OTHER; note = 2'-Omethyluridine
  modified_base 49: mod_base = OTHER; note = 2'-fluorocytosine phosphorothiorate
  modified_base 52: mod_base = OTHER; note = Guanosine phosphorothiorate
  modified_base 54: mod_base = OTHER; note = 2'-fluorouridine
  modified_base 57: mod_base = OTHER; note = Guanosine phosphorothiorate
  modified_base 65: mod_base = OTHER; note = 2'-fluoroguanosine
  modified_base 69: mod_base = OTHER; note = 2'-Omethyladenosine
  modified_base 71: mod_base = OTHER; note = 2'-fluorouridine
  modified_base 73: mod_base = OTHER; note = 2'-Omethylguanosine
  modified_base 76: mod_base = OTHER; note = 2'-fluoroadenosine

SEQ ID NO: 9629 - RNA, 76 nt, synthetic construct; identical to SEQ ID NO: 3675
  source 1..76: mol_type = other RNA
  modified_base 1: mod_base = OTHER; note = 2'-Omethylguanosine
  modified_base 2: mod_base = OTHER; note = 2'-Omethylcytosine
  modified_base 3: mod_base = OTHER; note = 2'-Omethylcytosine
  modified_base 4: mod_base = OTHER; note = 2'-Omethyluridine
  modified_base 5: mod_base = OTHER; note = 2'-Omethylcytosine
  modified_base 6: mod_base = OTHER; note = 2'-Omethylcytosine
  modified_base 16: mod_base = OTHER; note = 2'-Omethyluridine
  modified_base 17: mod_base = OTHER; note = 2'-Omethylguanosine
  modified_base 18: mod_base = OTHER; note = 2'-Omethylguanosine
  modified_base 20: mod_base = OTHER; note = 2'-Omethyluridine
  modified_base 22: mod_base = OTHER; note = 2'-Omethylguanosine
  modified_base 23: mod_base = OTHER; note = 2'-Omethylcytosine
  modified_base 24: mod_base = OTHER; note = 2'-Omethylguanosine
  modified_base 25: mod_base = OTHER; note = 2'-Omethylcytosine
  modified_base 33: mod_base = OTHER; note = 2'-fluorouridine
  modified_base 35: mod_base = OTHER; note = Cytosine phosphorothiorate
  modified_base 37: mod_base = OTHER; note = Adenosine phosphorothiorate
  modified_base 38: mod_base = OTHER; note = Adenosine phosphorothiorate
  modified_base 41: mod_base = OTHER; note = 2'-Omethylcytosine
  modified_base 42: mod_base = OTHER; note = 2'-Omethyladenosine
  modified_base 43: mod_base = OTHER; note = 2'-Omethylcytosine
  modified_base 44: mod_base = OTHER; note = 2'-Omethyladenosine
  modified_base 45: mod_base = OTHER; note = 2'-Omethylguanosine
  modified_base 46: mod_base = OTHER; note = 2'-fluoroguanosine
  modified_base 48: mod_base = OTHER; note = 2'-fluorouridine
  modified_base 49: mod_base = OTHER; note = 2'-Omethylcytosine
  modified_base 50: mod_base = OTHER; note = 2'-Omethylcytosine
  modified_base 52: mod_base = OTHER; note = 2'-Omethylguanosine
  modified_base 54: mod_base = OTHER; note = 2'-Omethyluridine
  modified_base 55: mod_base = OTHER; note = Uridine phosphorothiorate
  modified_base 56: mod_base = OTHER; note = 2'-Omethylcytosine
  modified_base 57: mod_base = OTHER; note = 2'-fluoroguanosine
  modified_base 59: mod_base = OTHER; note = 2'-Omethylguanosine
  modified_base 61: mod_base = OTHER; note = 2'-Omethylcytosine
  modified_base 65: mod_base = OTHER; note = 2'-Omethylguanosine
  modified_base 73: mod_base = OTHER; note = 2'-Omethylguanosine

SEQ ID NO: 9630 - DNA, 73 bp, synthetic construct; identical to SEQ ID NO: 3380
  source 1..73: mol_type = other DNA
  modified_base 1: mod_base = OTHER; note = 2'-Omethylguanosine phosphorothiorate
  modified_base 2: mod_base = OTHER; note = 2'-Omethylguanosine phosphorothiorate
  modified_base 19: mod_base = OTHER; note = Adenosine phosphorothiorate
  modified_base 29: mod_base = OTHER; note = 2'-O-(2-Methoxyethyl) guanosine
  modified_base 68: mod_base = OTHER; note = 2'-fluoroguanosine
  modified_base 72: mod_base = OTHER; note = 2'-Omethylcytosine
  misc_feature 1..19: note = RNA
  misc_feature 20: note = DNA
  misc_feature 21..43: note = RNA
  misc_feature 44: note = DNA
  misc_feature 45..73: note = RNA

SEQ ID NO: 9631 - RNA, 85 nt, synthetic construct; identical to SEQ ID NO: 3301
  source 1..85: mol_type = other RNA
  modified_base 1: mod_base = OTHER; note = 2'-Omethylguanosine phosphorothiorate
  modified_base 2: mod_base = OTHER; note = 2'-Omethylcytosine phosphorothiorate
  modified_base 8: mod_base = OTHER; note = 2'-fluorouridine
  modified_base 10: mod_base = OTHER; note = 2'-fluoroguanosine
  modified_base 11: mod_base = OTHER; note = 2'-fluorocytosine
  modified_base 16: mod_base = OTHER; note = Uridine phosphorothiorate
  modified_base 19: mod_base = OTHER; note = Uridine phosphorothiorate
  modified_base 24: mod_base = OTHER; note = Guanosine phosphorothiorate
  modified_base 31: mod_base = OTHER; note = Adenosine phosphorothiorate
  modified_base 38: mod_base = OTHER; note = 2'-fluoroadenosine phosphorothiorate
  modified_base 47: mod_base = OTHER; note = 2'-Omethylguanosine
  modified_base 50: mod_base = OTHER; note = Cytosine phosphorothiorate
  modified_base 51: mod_base = OTHER; note = Uridine phosphorothiorate
  modified_base 58: mod_base = OTHER; note = 2'-fluoroguanosine phosphorothiorate
  modified_base 67: mod_base = OTHER; note = Adenosine phosphorothiorate
  modified_base 82: mod_base = OTHER; note = 2'-Omethylguanosine phosphorothiorate

SEQ ID NO: 9632 - RNA, 75 nt, synthetic construct; identical to SEQ ID NO: 1045
  source 1..75: mol_type = other RNA
  modified_base 1: mod_base = OTHER; note = 2'-Omethylguanosine
  modified_base 2: mod_base = OTHER; note = 2'-Omethylguanosine phosphorothiorate
  modified_base 12: mod_base = OTHER; note = Guanosine phosphorothiorate
  modified_base 16: mod_base = OTHER; note = 2'-fluorouridine
  modified_base 19: mod_base = OTHER; note = 2'-fluorouridine
  modified_base 31: mod_base = OTHER; note = 2'-fluoroadenosine
  modified_base 40: mod_base = OTHER; note = Cytosine phosphorothiorate
  modified_base 41: mod_base = OTHER; note = 2'-fluorocytosine
  modified_base 43: mod_base = OTHER; note = 2'-fluoroguanosine
  modified_base 44: mod_base = OTHER; note = 2'-fluorocytosine
  modified_base 51: mod_base = OTHER; note = 2'-fluoroadenosine
  modified_base 55: mod_base = OTHER; note = 2'-fluorocytosine phosphorothiorate
  modified_base 74: mod_base = OTHER; note = Cytosine phosphorothiorate
  modified_base 75: mod_base = OTHER; note = 2'-fluoroadenosine

SEQ ID NO: 9633 - RNA, 76 nt, synthetic construct; identical to SEQ ID NO: 625
  source 1..76: mol_type = other RNA
  modified_base 1: mod_base = OTHER; note = 2'-Omethylguanosine
  modified_base 2: mod_base = OTHER; note = 2'-Omethylguanosine
  modified_base 3: mod_base = OTHER; note = 2'-Omethylcytosine
  modified_base 4: mod_base = OTHER; note = 2'-Omethyluridine
  modified_base 5: mod_base = OTHER; note = 2'-Omethylcytosine
  modified_base 6: mod_base = OTHER; note = 2'-Omethylcytosine
  modified_base 10: mod_base = OTHER; note = 2'-Omethylguanosine
  modified_base 13: mod_base = OTHER; note = 2'-Omethylcytosine
  modified_base 17: mod_base = OTHER; note = Guanosine phosphorothiorate
  modified_base 18: mod_base = OTHER; note = 2'-Omethylguanosine
  modified_base 19: mod_base = OTHER; note = Adenosine phosphorothiorate
  modified_base 20: mod_base = OTHER; note = 2'-Omethyluridine
  modified_base 25: mod_base = OTHER; note = 2'-Omethylcytosine
  modified_base 29: mod_base = OTHER; note = 2'-Omethylguanosine
  modified_base 33: mod_base = OTHER; note = 2'-fluorouridine
  modified_base 35: mod_base = OTHER; note = Cytosine phosphorothiorate
  modified_base 37: mod_base = OTHER; note = Adenosine phosphorothiorate
  modified_base 38: mod_base = OTHER; note = Adenosine phosphorothiorate
  modified_base 40: mod_base = OTHER; note = 2'-fluorouridine
  modified_base 41: mod_base = OTHER; note = 2'-Omethylcytosine
  modified_base 42: mod_base = OTHER; note = 2'-Omethyladenosine
  modified_base 43: mod_base = OTHER; note = 2'-Omethyladenosine
  modified_base 44: mod_base = OTHER; note = 2'-fluoroadenosine
  modified_base 46: mod_base = OTHER; note = Guanosine phosphorothiorate
  modified_base 50: mod_base = OTHER; note = 2'-Omethylcytosine
  modified_base 52: mod_base = OTHER; note = 2'-Omethylguanosine
  modified_base 54: mod_base = OTHER; note = Uridine phosphorothiorate
  modified_base 55: mod_base = OTHER; note = Uridine phosphorothiorate
  modified_base 56: mod_base = OTHER; note = 2'-Omethylcytosine
  modified_base 57: mod_base = OTHER; note = Guanosine phosphorothiorate
  modified_base 59: mod_base = OTHER; note = 2'-Omethylguanosine
  modified_base 62: mod_base = OTHER; note = 2'-Omethylcytosine
  modified_base 63: mod_base = OTHER; note = 2'-fluorocytosine
  modified_base 65: mod_base = OTHER; note = 2'-Omethylguanosine phosphorothiorate
  modified_base 68: mod_base = OTHER; note = 2'-Omethylguanosine
  modified_base 71: mod_base = OTHER; note = 2'-Omethyluridine
  modified_base 73: mod_base = OTHER; note = 2'-Omethylguanosine
  modified_base 75: mod_base = OTHER; note = 2'-fluorocytosine phosphorothiorate

SEQ ID NO: 9634 - RNA, 75 nt, synthetic construct; identical to SEQ ID NO: 1045
  source 1..75: mol_type = other RNA
  modified_base 1: mod_base = OTHER; note = 2'-Omethylguanosine phosphorothiorate
  modified_base 2: mod_base = OTHER; note = 2'-Omethylguanosine phosphorothiorate
  modified_base 12: mod_base = OTHER; note = Guanosine phosphorothiorate
  modified_base 14: mod_base = OTHER; note = 2'-Omethyladenosine
  modified_base 18: mod_base = OTHER; note = Guanosine phosphorothiorate
  modified_base 20: mod_base = OTHER; note = Adenosine phosphorothiorate
  modified_base 23: mod_base = OTHER; note = 2'-fluorocytosine
  modified_base 27: mod_base = OTHER; note = Cytosine phosphorothiorate
  modified_base 28: mod_base = OTHER; note = 2'-fluorouridine
  modified_base 38: mod_base = OTHER; note = 2'-fluoroadenosine
  modified_base 58: mod_base = OTHER; note = 2'-fluoroguanosine
  modified_base 59: mod_base = OTHER; note = 2'-Omethyluridine
  modified_base 60: mod_base = OTHER; note = 2'-fluorocytosine
  modified_base 68: mod_base = OTHER; note = 2'-fluoroadenosine
  modified_base 73: mod_base = OTHER; note = Cytosine phosphorothiorate
  modified_base 74: mod_base = OTHER; note = 2'-fluorocytosine phosphorothiorate

SEQ ID NO: 9635 - RNA, 75 nt, synthetic construct; identical to SEQ ID NO: 1045
  source 1..75: mol_type = other RNA
  modified_base 3: mod_base = OTHER; note = 2'-Omethyluridine phosphorothiorate
  modified_base 4: mod_base = OTHER; note = 2'-Omethyluridine phosphorothiorate
  modified_base 5: mod_base = OTHER; note = 2'-Omethylcytosine
  modified_base 6: mod_base = OTHER; note = Cytosine phosphorothiorate
  modified_base 8: mod_base = OTHER; note = 2'-Omethyluridine
  modified_base 12: mod_base = OTHER; note = 2'-Omethylguanosine
  modified_base 28: mod_base = OTHER; note = 2'-Omethyluridine
  modified_base 31: mod_base = OTHER; note = 2'-Omethyladenosine phosphorothiorate
  modified_base 52: mod_base = OTHER; note = 2'-Omethylguanosine phosphorothiorate
  modified_base 53: mod_base = OTHER; note = 2'-Omethyluridine
  modified_base 60: mod_base = OTHER; note = 2'-fluorocytosine phosphorothiorate
  modified_base 64: mod_base = OTHER; note = Guanosine phosphorothiorate
  modified_base 72: mod_base = OTHER; note = 2'-Omethyluridine
  modified_base 73: mod_base = OTHER; note = Cytosine phosphorothiorate
  modified_base 74: mod_base = OTHER; note = 2'-Omethylcytosine phosphorothiorate

SEQ ID NO: 9636 - RNA, 76 nt, synthetic construct; identical to SEQ ID NO: 3295
  source 1..76: mol_type = other RNA
  modified_base 1: mod_base = OTHER; note = 2'-Omethylcytosine phosphorothiorate
  modified_base 2: mod_base = OTHER; note = 2'-fluorocytosine
  modified_base 3: mod_base = OTHER; note = 2'-Omethyluridine
  modified_base 7: mod_base = OTHER; note = Adenosine phosphorothiorate
  modified_base 15: mod_base = OTHER; note = 2'-fluoroguanosine phosphorothiorate
  modified_base 24: mod_base = OTHER; note = 2'-fluoroguanosine phosphorothiorate
  modified_base 27: mod_base = OTHER; note = Guanosine phosphorothiorate
  modified_base 31: mod_base = OTHER; note = 2'-Omethyladenosine
  modified_base 36: mod_base = OTHER; note = 2'-fluoroadenosine
  modified_base 39: mod_base = OTHER; note = 2'-fluorouridine
  modified_base 40: mod_base = OTHER; note = 2'-fluorocytosine phosphorothiorate
  modified_base 47: mod_base = OTHER; note = Uridine phosphorothiorate
  modified_base 48: mod_base = OTHER; note = 2'-Omethylcytosine
  modified_base 54: mod_base = OTHER; note = 2'-Omethyluridine
  modified_base 75: mod_base = OTHER; note = 2'-Omethylcytosine phosphorothiorate
  modified_base 76: mod_base = OTHER; note = 2'-Omethyladenosine

SEQ ID NO: 9637 - RNA, 75 nt, synthetic construct; identical to SEQ ID NO: 3299
  source 1..75: mol_type = other RNA
  modified_base 1: mod_base = OTHER; note = 2'-Omethylcytosine
  modified_base 10: mod_base = OTHER; note = 2'-fluorocytosine
  modified_base 21: mod_base = OTHER; note = 2'-fluoroguanosine
  modified_base 22: mod_base = OTHER; note = 2'-fluoroadenosine
  modified_base 34: mod_base = OTHER; note = 2'-fluorouridine
  modified_base 36: mod_base = OTHER; note = 2'-fluoroadenosine
  modified_base 46: mod_base = OTHER; note = 2'-fluorouridine
  modified_base 47: mod_base = OTHER; note = 2'-fluorocytosine
  modified_base 73: mod_base = OTHER; note = Cytosine phosphorothiorate
  modified_base 74: mod_base = OTHER; note = 2'-Omethylcytosine

SEQ ID NO: 9638 - RNA, 86 nt, synthetic construct; identical to SEQ ID NO: 3290
  source 1..86: mol_type = other RNA
  modified_base 51: mod_base = OTHER; note = 2'-fluoroadenosine

SEQ ID NO: 9639 - RNA, 85 nt, synthetic construct; identical to SEQ ID NO: 3317
  source 1..85: mol_type = other RNA
  modified_base 1: mod_base = OTHER; note = 2'-Omethylguanosine phosphorothiorate
  modified_base 2: mod_base = OTHER; note = Cytosine phosphorothiorate
  modified_base 24: mod_base = OTHER; note = Guanosine phosphorothiorate
  modified_base 27: mod_base = OTHER; note = 2'-Omethyluridine phosphorothiorate
  modified_base 34: mod_base = OTHER; note = 2'-fluorocytosine
  modified_base 44: mod_base = OTHER; note = Uridine phosphorothiorate
  modified_base 56: mod_base = OTHER; note = Guanosine phosphorothiorate
  modified_base 82: mod_base = OTHER; note = 2'-Omethylguanosine phosphorothiorate

SEQ ID NO: 9640 - RNA, 76 nt, synthetic construct; identical to SEQ ID NO: 3295
  source 1..76: mol_type = other RNA
  modified_base 1: mod_base = OTHER; note = 2'-Omethylcytosine phosphorothiorate
  modified_base 2: mod_base = OTHER; note = Cytosine phosphorothiorate
  modified_base 3: mod_base = OTHER; note = 2'-Omethyluridine
  modified_base 4: mod_base = OTHER; note = 2'-Omethyluridine
  modified_base 6: mod_base = OTHER; note = 2'-Omethylguanosine phosphorothiorate
  modified_base 9: mod_base = OTHER; note = 2'-fluoroadenosine phosphorothiorate
  modified_base 10: mod_base = OTHER; note = 2'-fluoroguanosine phosphorothiorate
  modified_base 12: mod_base = OTHER; note = 2'-fluorouridine
  modified_base 24: mod_base = OTHER; note = 2'-fluoroguanosine phosphorothiorate
  modified_base 25: mod_base = OTHER; note = 2'-fluorocytosine
  modified_base 27: mod_base = OTHER; note = 2'-fluoroguanosine
  modified_base 29: mod_base = OTHER; note = 2'-fluoroguanosine
  modified_base 35: mod_base = OTHER; note = 2'-fluorouridine phosphorothiorate
  modified_base 39: mod_base = OTHER; note = Uridine phosphorothiorate
  modified_base 40: mod_base = OTHER; note = 2'-Omethylcytosine phosphorothiorate
  modified_base 45: mod_base = OTHER; note = 2'-fluoroguanosine phosphorothiorate
  modified_base 52: mod_base = OTHER; note = 2'-Omethylguanosine
  modified_base 53: mod_base = OTHER; note = 2'-fluoroguanosine phosphorothiorate
  modified_base 59: mod_base = OTHER; note = Adenosine phosphorothiorate
  modified_base 74: mod_base = OTHER; note = 2'-fluorocytosine
  modified_base 75: mod_base = OTHER; note = 2'-Omethylcytosine phosphorothiorate
  modified_base 76: mod_base = OTHER; note = 2'-fluoroadenosine

SEQ ID NO: 9641 - RNA, 76 nt, synthetic construct; identical to SEQ ID NO: 625
  source 1..76: mol_type = other RNA
  modified_base 2: mod_base = OTHER; note = 2'-fluoroguanosine
  modified_base 4: mod_base = OTHER; note = Uridine phosphorothiorate
  modified_base 5: mod_base = OTHER; note = 2'-Omethylcytosine
  modified_base 10: mod_base = OTHER; note = Guanosine phosphorothiorate
  modified_base 13: mod_base = OTHER; note = 2'-Omethylcytosine phosphorothiorate
  modified_base 14: mod_base = OTHER; note = 2'-fluoroadenosine
  modified_base 15: mod_base = OTHER; note = Adenosine phosphorothiorate
  modified_base 16: mod_base = OTHER; note = 2'-Omethyluridine
  modified_base 22: mod_base = OTHER; note = 2'-fluoroguanosine
  modified_base 27: mod_base = OTHER; note = 2'-Omethyluridine
  modified_base 30: mod_base = OTHER; note = 2'-fluoroguanosine
  modified_base 31: mod_base = OTHER; note = 2'-fluoroadenosine
  modified_base 34: mod_base = OTHER; note = 2'-fluorouridine
  modified_base 38: mod_base = OTHER; note = 2'-Omethyladenosine
  modified_base 39: mod_base = OTHER; note = 2'-fluorouridine
  modified_base 40: mod_base = OTHER; note = Uridine phosphorothiorate
  modified_base 42: mod_base = OTHER; note = 2'-fluoroadenosine phosphorothiorate
  modified_base 43: mod_base = OTHER; note = 2'-Omethyladenosine
  modified_base 46: mod_base = OTHER; note = 2'-Omethylguanosine
  modified_base 47: mod_base = OTHER; note = 2'-fluorouridine
  modified_base 49: mod_base = OTHER; note = 2'-fluorocytosine
  modified_base 59: mod_base = OTHER; note = 2'-fluoroguanosine
  modified_base 61: mod_base = OTHER; note = Cytosine phosphorothiorate
  modified_base 62: mod_base = OTHER; note = 2'-Omethylcytosine
  modified_base 63: mod_base = OTHER; note = Cytosine phosphorothiorate
  modified_base 65: mod_base = OTHER; note = Guanosine phosphorothiorate
  modified_base 66: mod_base = OTHER; note = Cytosine phosphorothiorate
  modified_base 67: mod_base = OTHER; note = 2'-Omethylguanosine
  modified_base 70: mod_base = OTHER; note = 2'-fluoroguanosine phosphorothiorate
  modified_base 71: mod_base = OTHER; note = 2'-Omethyluridine
  modified_base 72: mod_base = OTHER; note = 2'-fluorocytosine
  modified_base 73: mod_base = OTHER; note = Guanosine phosphorothiorate
  modified_base 74: mod_base = OTHER; note = 2'-fluorocytosine
  modified_base 76: mod_base = OTHER; note = 2'-fluoroadenosine

SEQ ID NO: 9642 - RNA, 85 nt, synthetic construct; identical to SEQ ID NO: 3297
  source 1..85: mol_type = other RNA
  modified_base 1: mod_base = OTHER; note = 2'-Omethylguanosine
  modified_base 2: mod_base = OTHER; note = 2'-Omethylcytosine
  modified_base 3: mod_base = OTHER; note = 2'-Omethyluridine
  modified_base 4: mod_base = OTHER; note = 2'-Omethylguanosine
  modified_base 5: mod_base = OTHER; note = 2'-Omethyluridine
  modified_base 6: mod_base = OTHER; note = 2'-Omethylguanosine
  modified_base 82: mod_base = OTHER; note = 2'-Omethylguanosine

SEQ ID NO: 9643 - RNA, 76 nt, synthetic construct; identical to SEQ ID NO: 3329
  source 1..76: mol_type = other RNA
  modified_base 1: mod_base = OTHER; note = 2'-Omethylguanosine
  modified_base 13: mod_base = OTHER; note = 2'-Omethylcytosine
  modified_base 17: mod_base = OTHER; note = 2'-Omethylguanosine
  modified_base 18: mod_base = OTHER; note = 2'-Omethylguanosine
  modified_base 25: mod_base = OTHER; note = 2'-Omethylcytosine
  modified_base 33: mod_base = OTHER; note = Uridine phosphorothiorate
  modified_base 34: mod_base = OTHER; note = 2'-Omethyluridine
  modified_base 35: mod_base = OTHER; note = Cytosine phosphorothiorate
  modified_base 37: mod_base = OTHER; note = Adenosine phosphorothiorate
  modified_base 38: mod_base = OTHER; note = Adenosine phosphorothiorate
  modified_base 41: mod_base = OTHER; note = 2'-fluorocytosine
  modified_base 42: mod_base = OTHER; note = 2'-Omethyladenosine
  modified_base 43: mod_base = OTHER; note = 2'-Omethyladenosine
  modified_base 44: mod_base = OTHER; note = 2'-fluoroadenosine
  modified_base 49: mod_base = OTHER; note = 2'-Omethylcytosine
  modified_base 50: mod_base = OTHER; note = 2'-Omethylcytosine
  modified_base 52: mod_base = OTHER; note = 2'-Omethylguanosine
  modified_base 54: mod_base = OTHER; note = Uridine phosphorothiorate
  modified_base 55: mod_base = OTHER; note = Uridine phosphorothiorate
  modified_base 56: mod_base = OTHER; note = 2'-Omethylcytosine
  modified_base 57: mod_base = OTHER; note = Guanosine phosphorothiorate
  modified_base 58: mod_base = OTHER; note = Adenosine phosphorothiorate
  modified_base 59: mod_base = OTHER; note = 2'-Omethylguanosine
  modified_base 61: mod_base = OTHER; note = 2'-Omethylcytosine
  modified_base 65: mod_base = OTHER; note = 2'-Omethylguanosine
  modified_base 73: mod_base = OTHER; note = 2'-Omethylguanosine

SEQ ID NO: 9644 - DNA, 74 bp, synthetic construct; identical to SEQ ID NO: 3384
  source 1..74: mol_type = other DNA
  modified_base 1: mod_base = OTHER; note = 2'-Omethylguanosine phosphorothiorate
  modified_base 2: mod_base = OTHER; note = 2'-Omethylguanosine
  modified_base 13: mod_base = OTHER; note = 2'-fluorocytosine
  modified_base 22: mod_base = OTHER; note = Guanosine phosphorothiorate
  modified_base 68: mod_base = OTHER; note = 2'-fluoroguanosine
  modified_base 73: mod_base = OTHER; note = 2'-Omethylguanosine phosphorothiorate
  misc_feature 1..22: note = RNA
  misc_feature 23: note = DNA
  misc_feature 24..74: note = RNA

SEQ ID NO: 9645 - RNA, 75 nt, synthetic construct; identical to SEQ ID NO: 1045
  source 1..75: mol_type = other RNA
  modified_base 2: mod_base = OTHER; note = 2'-Omethylguanosine phosphorothiorate
  modified_base 3: mod_base = OTHER; note = 2'-Omethyluridine phosphorothiorate
  modified_base 15: mod_base = OTHER; note = 2'-fluoroadenosine phosphorothiorate
  modified_base 17: mod_base = OTHER; note = 2'-Omethylguanosine
  modified_base 20: mod_base = OTHER; note = 2'-fluoroadenosine phosphorothiorate
  modified_base 30: mod_base = OTHER; note = 2'-Omethylguanosine
  modified_base 31: mod_base = OTHER; note = 2'-Omethyladenosine phosphorothiorate
  modified_base 43: mod_base = OTHER; note = 2'-Omethylguanosine phosphorothiorate
  modified_base 48: mod_base = OTHER; note = 2'-Omethylcytosine
  modified_base 50: mod_base = OTHER; note = Guanosine phosphorothiorate
  modified_base 55: mod_base = OTHER; note = 2'-Omethylcytosine
  modified_base 58: mod_base = OTHER; note = 2'-Omethylguanosine
  modified_base 61: mod_base = OTHER; note = 2'-Omethyluridine
  modified_base 62: mod_base = OTHER; note = 2'-Omethylcytosine phosphorothiorate
  modified_base 65: mod_base = OTHER; note = 2'-Omethyluridine
  modified_base 72: mod_base = OTHER; note = 2'-Omethyluridine
  modified_base 74: mod_base = OTHER; note = 2'-Omethylcytosine phosphorothiorate
  modified_base 75: mod_base = OTHER; note = 2'-Omethyladenosine

SEQ ID NO: 9646 - RNA, 75 nt, synthetic construct; identical to SEQ ID NO: 1045
  source 1..75: mol_type = other RNA
  modified_base 2: mod_base = OTHER; note = 2'-Omethylguanosine phosphorothiorate
  modified_base 3: mod_base = OTHER; note = 2'-Omethyluridine phosphorothiorate
  modified_base 12: mod_base = OTHER; note = 2'-Omethylguanosine phosphorothiorate
  modified_base 16: mod_base = OTHER; note = Uridine phosphorothiorate
  modified_base 18: mod_base = OTHER; note = 2'-Omethylguanosine
  modified_base 28: mod_base = OTHER; note = 2'-fluorouridine phosphorothiorate
  modified_base 30: mod_base = OTHER; note = 2'-Omethylguanosine
  modified_base 31: mod_base = OTHER; note = 2'-fluoroadenosine phosphorothiorate
  modified_base 57: mod_base = OTHER; note = 2'-fluoroadenosine
  modified_base 60: mod_base = OTHER; note = 2'-Omethylcytosine
  modified_base 62: mod_base = OTHER; note = 2'-fluorocytosine phosphorothiorate
  modified_base 63: mod_base = OTHER; note = 2'-Omethylguanosine
  modified_base 66: mod_base = OTHER; note = 2'-Omethylguanosine
  modified_base 67: mod_base = OTHER; note = 2'-Omethylguanosine
  modified_base 68: mod_base = OTHER; note = 2'-Omethyladenosine
  modified_base 72: mod_base = OTHER; note = 2'-Omethyluridine
  modified_base 74: mod_base = OTHER; note = 2'-Omethylcytosine phosphorothiorate

SEQ ID NO: 9647 - RNA, 85 nt, synthetic construct; identical to SEQ ID NO: 3317
  source 1..85: mol_type = other RNA
  modified_base 1: mod_base = OTHER; note = 2'-Omethylguanosine phosphorothiorate
  modified_base 2: mod_base = OTHER; note = 2'-Omethylcytosine
  modified_base 3: mod_base = OTHER; note = 2'-fluorouridine phosphorothiorate
  modified_base 5: mod_base = OTHER; note = 2'-Omethyluridine phosphorothiorate
  modified_base 13: mod_base = OTHER; note = 2'-fluoroguanosine
  modified_base 14: mod_base = OTHER; note = 2'-fluoroadenosine
  modified_base 18: mod_base = OTHER; note = 2'-Omethylguanosine
  modified_base 23: mod_base = OTHER; note = 2'-Omethylguanosine phosphorothiorate
  modified_base 25: mod_base = OTHER; note = 2'-Omethylcytosine phosphorothiorate
  modified_base 27: mod_base = OTHER; note = 2'-Omethyluridine
  modified_base 34: mod_base = OTHER; note = 2'-fluorocytosine
  modified_base 35: mod_base = OTHER; note = 2'-fluorouridine
  modified_base 42: mod_base = OTHER; note = 2'-fluoroadenosine
  modified_base 44: mod_base = OTHER; note = 2'-fluorouridine phosphorothiorate
  modified_base 51: mod_base = OTHER; note = 2'-fluorouridine
  modified_base 54: mod_base = OTHER; note = 2'-Omethylcytosine
  modified_base 56: mod_base = OTHER; note = 2'-Omethylguanosine
  modified_base 59: mod_base = OTHER; note = 2'-fluorocytosine
  modified_base 60: mod_base = OTHER; note = 2'-Omethyladenosine
  modified_base 62: mod_base = OTHER; note = Guanosine phosphorothiorate
  modified_base 64: mod_base = OTHER; note = Uridine phosphorothiorate
  modified_base 73: mod_base = OTHER; note = Guanosine phosphorothiorate
  modified_base 74: mod_base = OTHER; note = 2'-fluorocytosine phosphorothiorate
  modified_base 82: mod_base = OTHER; note = 2'-Omethylguanosine
  modified_base 83: mod_base = OTHER; note = Cytosine phosphorothiorate

SEQ ID NO: 9648 - RNA, 86 nt, synthetic construct; identical to SEQ ID NO: 3290
  source 1..86: mol_type = other RNA
  modified_base 1: mod_base = OTHER; note = 2'-Omethyladenosine
  modified_base 2: mod_base = OTHER; note = 2'-Omethylcytosine
  modified_base 3: mod_base = OTHER; note = 2'-Omethylcytosine
  modified_base 4: mod_base = OTHER; note = 2'-Omethyladenosine

SEQ ID NO: 9649 - DNA, 73 bp, synthetic construct; identical to SEQ ID NO: 3380
  source 1..73: mol_type = other DNA
  modified_base 1: mod_base = OTHER; note = 2'-Omethylguanosine phosphorothiorate
  modified_base 2: mod_base = OTHER; note = 2'-Omethylguanosine phosphorothiorate
  modified_base 52: mod_base = OTHER; note = 2'-Omethylguanosine
  modified_base 63: mod_base = OTHER; note = Cytosine phosphorothiorate
  misc_feature 1..63: note = RNA
  misc_feature 64: note = DNA
  misc_feature 65..73: note = RNA

SEQ ID NO: 9650 - RNA, 86 nt, synthetic construct; identical to SEQ ID NO: 3290
  source 1..86: mol_type = other RNA
  modified_base 81: mod_base = OTHER; note = 2'-fluoroguanosine

SEQ ID NO: 9651 - RNA, 85 nt, synthetic construct; identical to SEQ ID NO: 3288
  source 1..85: mol_type = other RNA
  modified_base 1: mod_base = OTHER; note = 2'-Omethylcytosine
  modified_base 3: mod_base = OTHER; note = 2'-fluoroadenosine
  modified_base 11: mod_base = OTHER; note = Cytosine phosphorothiorate
  modified_base 30: mod_base = OTHER; note = 2'-fluoroadenosine
  modified_base 46: mod_base = OTHER; note = 2'-Omethyladenosine
  modified_base 49: mod_base = OTHER; note = Uridine phosphorothiorate
  modified_base 54: mod_base = OTHER; note = 2'-fluorocytosine
  modified_base 55: mod_base = OTHER; note = 2'-Omethylcytosine
  modified_base 58: mod_base = OTHER; note = Guanosine phosphorothiorate
  modified_base 72: mod_base = OTHER; note = 2'-fluorocytosine
  modified_base 84: mod_base = OTHER; note = 2'-fluorocytosine phosphorothiorate

SEQ ID NO: 9652 - DNA, 76 bp, synthetic construct; identical to SEQ ID NO: 1924
  source 1..76: mol_type = other DNA
  modified_base 1: mod_base = OTHER; note = 2'-Omethylguanosine phosphorothiorate
  modified_base 2: mod_base = OTHER; note = 2'-Omethylguanosine
  modified_base 13: mod_base = OTHER; note = 2'-fluorocytosine
  modified_base 22: mod_base = OTHER; note = Guanosine phosphorothiorate
  modified_base 68: mod_base = OTHER; note = 2'-fluoroguanosine
  modified_base 73: mod_base = OTHER; note = Guanosine phosphorothiorate
  modified_base 74: mod_base = OTHER; note = Cytosine phosphorothiorate
  modified_base 75: mod_base = OTHER; note = 2'-Omethylcytosine phosphorothiorate
  modified_base 76: mod_base = OTHER; note = 2'-Omethyladenosine
  misc_feature 1..22: note = RNA
  misc_feature 23: note = DNA
  misc_feature 24..76: note = RNA

SEQ ID NO: 9653 - RNA, 76 nt, synthetic construct; identical to SEQ ID NO: 3615
  source 1..76: mol_type = other RNA
  modified_base 1: mod_base = OTHER; note = 2'-Omethylguanosine
  modified_base 2: mod_base = OTHER; note = 2'-Omethylguanosine
  modified_base 3: mod_base = OTHER; note = 2'-Omethylcytosine
  modified_base 4: mod_base = OTHER; note = 2'-Omethyluridine
  modified_base 5: mod_base = OTHER; note = 2'-Omethylcytosine
  modified_base 6: mod_base = OTHER; note = 2'-Omethylcytosine
  modified_base 14: mod_base = OTHER; note = 2'-Omethyladenosine
  modified_base 17: mod_base = OTHER; note = 2'-Omethylguanosine
  modified_base 18: mod_base = OTHER; note = 2'-Omethylguanosine
  modified_base 20: mod_base = OTHER; note = 2'-Omethyluridine
  modified_base 22: mod_base = OTHER; note = 2'-Omethylguanosine
  modified_base 25: mod_base = OTHER; note = 2'-Omethylcytosine
  modified_base 27: mod_base = OTHER; note = 2'-Omethyluridine
  modified_base 33: mod_base = OTHER; note = 2'-fluorouridine
  modified_base 71: mod_base = OTHER; note = 2'-Omethyluridine
  modified_base 73: mod_base = OTHER; note = 2'-Omethylguanosine

SEQ ID NO: 9654 - RNA, 76 nt, synthetic construct; identical to SEQ ID NO: 625
  source 1..76: mol_type = other RNA
  modified_base 1: mod_base = OTHER; note = 2'-Omethylguanosine
  modified_base 2: mod_base = OTHER; note = 2'-Omethylguanosine
  modified_base 3: mod_base = OTHER; note = 2'-Omethylcytosine
  modified_base 4: mod_base = OTHER; note = 2'-Omethyluridine
  modified_base 5: mod_base = OTHER; note = 2'-Omethylcytosine
  modified_base 6: mod_base = OTHER; note = 2'-Omethylcytosine
  modified_base 10: mod_base = OTHER; note = 2'-Omethylguanosine
  modified_base 11: mod_base = OTHER; note = 2'-Omethylcytosine
  modified_base 12: mod_base = OTHER; note = 2'-Omethylguanosine
  modified_base 13: mod_base = OTHER; note = 2'-Omethylcytosine
  modified_base 17: mod_base = OTHER; note = 2'-Omethylguanosine
  modified_base 22: mod_base = OTHER; note = 2'-Omethylguanosine
  modified_base 23: mod_base = OTHER; note = 2'-Omethylcytosine
  modified_base 24: mod_base = OTHER; note = 2'-Omethylguanosine
  modified_base 25: mod_base = OTHER; note = 2'-Omethylcytosine
  modified_base 33: mod_base = OTHER; note = 2'-fluorouridine
  modified_base 35: mod_base = OTHER; note = Cytosine phosphorothiorate
  modified_base 37: mod_base = OTHER; note = Adenosine phosphorothiorate
  modified_base 38: mod_base = OTHER; note = Adenosine phosphorothiorate
  modified_base 49: mod_base = OTHER; note = 2'-Omethylcytosine
  modified_base 50: mod_base = OTHER; note = 2'-Omethylcytosine
  modified_base 51: mod_base = OTHER; note = 2'-Omethylguanosine
  modified_base 52: mod_base = OTHER; note = 2'-Omethylguanosine
  modified_base 53: mod_base = OTHER; note = 2'-Omethylguanosine
  modified_base 56: mod_base = OTHER; note = 2'-Omethylcytosine
  modified_base 57: mod_base = OTHER; note = 2'-Omethylguanosine
  modified_base 61: mod_base = OTHER; note = 2'-Omethylcytosine
  modified_base 62: mod_base = OTHER; note = 2'-Omethylcytosine
  modified_base 63: mod_base = OTHER; note = 2'-fluorocytosine
  modified_base 64: mod_base = OTHER; note = 2'-Omethylguanosine
  modified_base 65: mod_base = OTHER; note = 2'-Omethylguanosine
  modified_base 66: mod_base = OTHER; note = 2'-Omethylcytosine
  modified_base 67: mod_base = OTHER; note = 2'-Omethylguanosine
  modified_base 68: mod_base = OTHER; note = 2'-Omethylguanosine
  modified_base 69: mod_base = OTHER; note = 2'-fluoroadenosine
  modified_base 71: mod_base = OTHER; note = 2'-Omethyluridine
  modified_base 73: mod_base = OTHER; note = 2'-Omethylguanosine
  modified_base 75: mod_base = OTHER; note = 2'-fluorocytosine phosphorothiorate

SEQ ID NO: 9655 - RNA, 75 nt, synthetic construct; identical to SEQ ID NO: 3306
  source 1..75: mol_type = other RNA
  modified_base 1: mod_base = OTHER; note = 2'-Omethylguanosine
  modified_base 18: mod_base = OTHER; note = 2'-Omethylguanosine

SEQ ID NO: 9656 - RNA, 86 nt, synthetic construct; identical to SEQ ID NO: 3290
  source 1..86: mol_type = other RNA
  modified_base 34: mod_base = OTHER; note = 2'-fluorouridine

SEQ ID NO: 9657 - RNA, 85 nt, synthetic construct; identical to SEQ ID NO: 3317
  source 1..85: mol_type = other RNA
  modified_base 3: mod_base = OTHER; note = Uridine phosphorothiorate
  modified_base 16: mod_base = OTHER; note = 2'-Omethyluridine
  modified_base 35: mod_base = OTHER; note = 2'-fluorouridine
  modified_base 50: mod_base = OTHER; note = 2'-Omethylcytosine phosphorothiorate
  modified_base 61: mod_base = OTHER; note = 2'-fluoroguanosine
  modified_base 62: mod_base = OTHER; note = 2'-Omethylguanosine
  modified_base 82: mod_base = OTHER; note = 2'-Omethylguanosine

SEQ ID NO: 9658 - RNA, 76 nt, synthetic construct; identical to SEQ ID NO: 625
  source 1..76: mol_type = other RNA
  modified_base 1: mod_base = OTHER; note = 2'-Omethylguanosine phosphorothiorate
  modified_base 2: mod_base = OTHER; note = 2'-Omethylguanosine
  modified_base 13: mod_base = OTHER; note = 2'-Omethylcytosine
  modified_base 33: mod_base = OTHER; note = 2'-fluorouridine
  modified_base 35: mod_base = OTHER; note = Cytosine phosphorothiorate
  modified_base 37: mod_base = OTHER; note = Adenosine phosphorothiorate
  modified_base 38: mod_base = OTHER; note = Adenosine phosphorothiorate
  modified_base 50: mod_base = OTHER; note = 2'-Omethylcytosine
  modified_base 52: mod_base = OTHER; note = 2'-fluoroguanosine
  modified_base 62: mod_base = OTHER; note = 2'-Omethylcytosine
  modified_base 63: mod_base = OTHER; note = 2'-fluorocytosine
  modified_base 65: mod_base = OTHER; note = 2'-Omethylguanosine
  modified_base 68: mod_base = OTHER; note = 2'-Omethylguanosine
  modified_base 73: mod_base = OTHER; note = 2'-Omethylguanosine
  modified_base 75: mod_base = OTHER; note = 2'-fluorocytosine phosphorothiorate

SEQ ID NO: 9659 - RNA, 85 nt, synthetic construct; identical to SEQ ID NO: 3297
  source 1..85: mol_type = other RNA
  modified_base 22: mod_base = OTHER; note = 2'-Omethyladenosine
  modified_base 23: mod_base = OTHER; note = 2'-Omethylguanosine
  modified_base 24: mod_base = OTHER; note = 2'-Omethylguanosine
  modified_base 25: mod_base = OTHER; note = 2'-Omethylcytosine
  modified_base 82: mod_base = OTHER; note = 2'-Omethylguanosine

SEQ ID NO: 9660 - RNA, 76 nt, synthetic construct; identical to SEQ ID NO: 625
  source 1..76: mol_type = other RNA
  modified_base 1: mod_base = OTHER; note = 2'-Omethylguanosine phosphorothiorate
  modified_base 2: mod_base = OTHER; note = 2'-Omethylguanosine phosphorothiorate
  modified_base 3: mod_base = OTHER; note = 2'-Omethylcytosine
  modified_base 4: mod_base = OTHER; note = 2'-Omethyluridine
  modified_base 5: mod_base = OTHER; note = 2'-Omethylcytosine
  modified_base 6: mod_base = OTHER; note = 2'-Omethylcytosine
  modified_base 10: mod_base = OTHER; note = 2'-Omethylguanosine
  modified_base 11: mod_base = OTHER; note = 2'-Omethylcytosine
  modified_base 12: mod_base = OTHER; note = 2'-Omethylguanosine
  modified_base 13: mod_base = OTHER; note = 2'-Omethylcytosine
  modified_base 14: mod_base = OTHER; note = 2'-Omethyladenosine
  modified_base 15: mod_base = OTHER; note = 2'-fluoroadenosine
  modified_base 16: mod_base = OTHER; note = 2'-Omethyluridine
  modified_base 17: mod_base = OTHER; note = 2'-Omethylguanosine
  modified_base 18: mod_base = OTHER; note = 2'-Omethylguanosine
  modified_base 19: mod_base = OTHER; note = 2'-fluoroadenosine
  modified_base 20: mod_base = OTHER; note = 2'-Omethyluridine
  modified_base 21: mod_base = OTHER; note = 2'-fluoroadenosine
  modified_base 22: mod_base = OTHER; note = 2'-Omethylguanosine
  modified_base 23: mod_base = OTHER; note = 2'-Omethylcytosine
  modified_base 24: mod_base = OTHER; note = 2'-Omethylguanosine
  modified_base 25: mod_base = OTHER; note = 2'-Omethylcytosine
  modified_base 38: mod_base = OTHER; note = Adenosine phosphorothiorate
  modified_base 39: mod_base = OTHER; note = Uridine phosphorothiorate
  modified_base 40: mod_base = OTHER; note = 2'-fluorouridine
  modified_base 43: mod_base = OTHER; note = 2'-Omethyladenosine
  modified_base 44: mod_base = OTHER; note = 2'-Omethyladenosine
  modified_base 45: mod_base = OTHER; note = 2'-Omethylguanosine
  modified_base 46: mod_base = OTHER; note = 2'-fluoroguanosine
  modified_base 48: mod_base = OTHER; note = 2'-fluorouridine
  modified_base 49: mod_base = OTHER; note = 2'-Omethylcytosine
  modified_base 50: mod_base = OTHER; note = 2'-Omethylcytosine
  modified_base 54: mod_base = OTHER; note = 2'-Omethyluridine phosphorothiorate
  modified_base 55: mod_base = OTHER; note = Uridine phosphorothiorate
  modified_base 56: mod_base = OTHER; note = 2'-Omethylcytosine
  modified_base 57: mod_base = OTHER; note = 2'-fluoroguanosine
  modified_base 61: mod_base = OTHER; note = 2'-Omethylcytosine
  modified_base 62: mod_base = OTHER; note = 2'-Omethylcytosine
  modified_base 63: mod_base = OTHER; note = 2'-fluorocytosine
  modified_base 64: mod_base = OTHER; note = 2'-Omethylguanosine
  modified_base 65: mod_base = OTHER; note = 2'-Omethylguanosine
  modified_base 66: mod_base = OTHER; note = 2'-Omethylcytosine
  modified_base 67: mod_base = OTHER; note = 2'-Omethylguanosine
  modified_base 68: mod_base = OTHER; note = 2'-Omethylguanosine

SEQ ID NO: 9661 - RNA, 85 nt, synthetic construct; identical to SEQ ID NO: 3297
  source 1..85: mol_type = other RNA
  modified_base 1: mod_base = OTHER; note = 2'-Omethylguanosine phosphorothiorate
  modified_base 2: mod_base = OTHER; note = Cytosine phosphorothiorate
  modified_base 3: mod_base = OTHER; note = 2'-Omethyluridine phosphorothiorate
  modified_base 6: mod_base = OTHER; note = 2'-fluoroguanosine
  modified_base 15: mod_base = OTHER; note = 2'-Omethylguanosine
  modified_base 17: mod_base = OTHER; note = 2'-Omethylguanosine
  modified_base 34: mod_base = OTHER; note = 2'-fluorouridine
  modified_base 50: mod_base = OTHER; note = Cytosine phosphorothiorate
  modified_base 54: mod_base = OTHER; note = Cytosine phosphorothiorate
  modified_base 56: mod_base = OTHER; note = 2'-fluoroguanosine
  modified_base 70: mod_base = OTHER; note = 2'-Omethylcytosine phosphorothiorate
  modified_base 72: mod_base = OTHER; note = 2'-fluorouridine
  modified_base 82: mod_base = OTHER; note = 2'-Omethylguanosine

SEQ ID NO: 9662 - RNA, 75 nt, synthetic construct; identical to SEQ ID NO: 1045
  source 1..75: mol_type = other RNA
  modified_base 11: mod_base = OTHER; note = 2'-fluorouridine
  modified_base 12: mod_base = OTHER; note = 2'-Omethylguanosine
  modified_base 16: mod_base = OTHER; note = Uridine phosphorothiorate
  modified_base 22: mod_base = OTHER; note = 2'-fluoroguanosine
  modified_base 28: mod_base = OTHER; note = Uridine phosphorothiorate
  modified_base 41: mod_base = OTHER; note = 2'-fluorocytosine
  modified_base 60: mod_base = OTHER; note = 2'-fluorocytosine
  modified_base 65: mod_base = OTHER; note = Uridine phosphorothiorate
  modified_base 74: mod_base = OTHER; note = Cytosine phosphorothiorate

SEQ ID NO: 9663 - RNA, 76 nt, synthetic construct; identical to SEQ ID NO: 625
  source 1..76: mol_type = other RNA
  modified_base 1: mod_base = OTHER; note = 2'-Omethylguanosine
  modified_base 3: mod_base = OTHER; note = 2'-fluorocytosine
  modified_base 4: mod_base = OTHER; note = 2'-Omethyluridine phosphorothiorate
  modified_base 6: mod_base = OTHER; note = 2'-Omethylcytosine
  modified_base 7: mod_base = OTHER; note = Guanosine phosphorothiorate
  modified_base 12: mod_base = OTHER; note = 2'-Omethylguanosine
  modified_base 14: mod_base = OTHER; note = 2'-fluoroadenosine
  modified_base 15: mod_base = OTHER; note = 2'-Omethyladenosine
  modified_base 16: mod_base = OTHER; note = 2'-Omethyluridine
  modified_base 20: mod_base = OTHER; note = 2'-fluorouridine
  modified_base 22: mod_base = OTHER; note = 2'-Omethylguanosine phosphorothiorate
  modified_base 23: mod_base = OTHER; note = 2'-fluorocytosine phosphorothiorate
  modified_base 25: mod_base = OTHER; note = 2'-Omethylcytosine
  modified_base 27: mod_base = OTHER; note = 2'-Omethyluridine
  modified_base 29: mod_base = OTHER; note = Guanosine phosphorothiorate
  modified_base 30: mod_base = OTHER; note = 2'-fluoroguanosine
  modified_base 34: mod_base = OTHER; note = Uridine phosphorothiorate
  modified_base 36: mod_base = OTHER; note = Adenosine phosphorothiorate
  modified_base 46: mod_base = OTHER; note = 2'-Omethylguanosine
  modified_base 47: mod_base = OTHER; note = Uridine phosphorothiorate
  modified_base 48: mod_base = OTHER; note = 2'-Omethyluridine
  modified_base 50: mod_base = OTHER; note = 2'-Omethylcytosine
  modified_base 52: mod_base = OTHER; note = 2'-fluoroguanosine phosphorothiorate
  modified_base 53: mod_base = OTHER; note = 2'-fluoroguanosine
  modified_base 55: mod_base = OTHER; note = Uridine phosphorothiorate
  modified_base 56: mod_base = OTHER; note = 2'-Omethylcytosine
  modified_base 63: mod_base = OTHER; note = 2'-Omethylcytosine
  modified_base 64: mod_base = OTHER; note = 2'-Omethylguanosine
  modified_base 65: mod_base = OTHER; note = 2'-Omethylguanosine phosphorothiorate
  modified_base 66: mod_base = OTHER; note = Cytosine phosphorothiorate
  modified_base 69: mod_base = OTHER; note = Adenosine phosphorothiorate
  modified_base 70: mod_base = OTHER; note = 2'-fluoroguanosine
  modified_base 72: mod_base = OTHER; note = 2'-fluorocytosine
  modified_base 74: mod_base = OTHER; note = 2'-Omethylcytosine
  modified_base 75: mod_base = OTHER; note = 2'-Omethylcytosine
  modified_base 76: mod_base = OTHER; note = 2'-fluoroadenosine

SEQ ID NO: 9664 - RNA, 76 nt, synthetic construct; identical to SEQ ID NO: 3675
  source 1..76: mol_type = other RNA
  modified_base 1: mod_base = OTHER; note = 2'-Omethylguanosine phosphorothiorate
  modified_base 2: mod_base = OTHER; note = 2'-Omethylcytosine
  modified_base 3: mod_base = OTHER; note = 2'-Omethylcytosine
  modified_base 4: mod_base = OTHER; note = 2'-Omethyluridine
  modified_base 5: mod_base = OTHER; note = 2'-Omethylcytosine
  modified_base 6: mod_base = OTHER; note = 2'-Omethylcytosine
  modified_base 49: mod_base = OTHER; note = 2'-Omethylcytosine
  modified_base 50: mod_base = OTHER; note = 2'-Omethylcytosine
  modified_base 51: mod_base = OTHER; note = 2'-Omethylguanosine
  modified_base 52: mod_base = OTHER; note = 2'-Omethylguanosine
  modified_base 53: mod_base = OTHER; note = 2'-Omethylguanosine
  modified_base 61: mod_base = OTHER; note = 2'-Omethylcytosine
  modified_base 62: mod_base = OTHER; note = 2'-Omethylcytosine
  modified_base 63: mod_base = OTHER; note = 2'-fluorocytosine
  modified_base 64: mod_base = OTHER; note = 2'-Omethylguanosine
  modified_base 65: mod_base = OTHER; note = 2'-Omethylguanosine
  modified_base 66: mod_base = OTHER; note = 2'-Omethylcytosine
  modified_base 67: mod_base = OTHER; note = 2'-Omethylguanosine
  modified_base 68: mod_base = OTHER; note = 2'-Omethylguanosine
  modified_base 69: mod_base = OTHER; note = 2'-Omethyladenosine
  modified_base 71: mod_base = OTHER; note = 2'-Omethylguanosine
  modified_base 72: mod_base = OTHER; note = 2'-Omethylcytosine

SEQ ID NO: 9665 - RNA, 76 nt, synthetic construct; identical to SEQ ID NO: 625
  source 1..76: mol_type = other RNA
  modified_base 1: mod_base = OTHER; note = 2'-Omethylguanosine
  modified_base 2: mod_base = OTHER; note = 2'-Omethylguanosine
  modified_base 33: mod_base = OTHER; note = 2'-fluorouridine
  modified_base 37: mod_base = OTHER; note = Adenosine phosphorothiorate
  modified_base 52: mod_base = OTHER; note = 2'-Omethylguanosine
  modified_base 62: mod_base = OTHER; note = 2'-Omethylcytosine
  modified_base 73: mod_base = OTHER; note = 2'-Omethylguanosine
  modified_base 75: mod_base = OTHER; note = 2'-fluorocytosine phosphorothiorate

SEQ ID NO: 9666 - RNA, 85 nt, synthetic construct; identical to SEQ ID NO: 3288
  source 1..85: mol_type = other RNA
  modified_base 2: mod_base = OTHER; note = 2'-Omethylcytosine phosphorothiorate
  modified_base 45: mod_base = OTHER; note = Guanosine phosphorothiorate
  modified_base 48: mod_base = OTHER; note = Adenosine phosphorothiorate
  modified_base 58: mod_base = OTHER; note = 2'-Omethylguanosine
  modified_base 67: mod_base = OTHER; note = Adenosine phosphorothiorate
  modified_base 84: mod_base = OTHER; note = 2'-fluorocytosine

SEQ ID NO: 9667 - RNA, 76 nt, synthetic construct; identical to SEQ ID NO: 3289
  source 1..76: mol_type = other RNA
  modified_base 1: mod_base = OTHER; note = 2'-Omethylguanosine
  modified_base 2: mod_base = OTHER; note = 2'-Omethylcytosine
  modified_base 3: mod_base = OTHER; note = 2'-Omethylcytosine
  modified_base 4: mod_base = OTHER; note = 2'-Omethyluridine
  modified_base 5: mod_base = OTHER; note = 2'-Omethylguanosine
  modified_base 6: mod_base = OTHER; note = 2'-Omethylguanosine
  modified_base 13: mod_base = OTHER; note = 2'-Omethylcytosine
  modified_base 14: mod_base = OTHER; note = 2'-Omethyladenosine
  modified_base 15: mod_base = OTHER; note = 2'-Omethylguanosine
  modified_base 16: mod_base = OTHER; note = 2'-Omethyluridine
  modified_base 18: mod_base = OTHER; note = 2'-Omethylguanosine
  modified_base 19: mod_base = OTHER; note = 2'-Omethylguanosine
  modified_base 20: mod_base = OTHER; note = Uridine phosphorothiorate
  modified_base 21: mod_base = OTHER; note = Adenosine phosphorothiorate
  modified_base 25: mod_base = OTHER; note = 2'-Omethylcytosine
  modified_base 33: mod_base = OTHER; note = Uridine phosphorothiorate
  modified_base 34: mod_base = OTHER; note = 2'-Omethyluridine
  modified_base 35: mod_base = OTHER; note = Uridine phosphorothiorate
  modified_base 37: mod_base = OTHER; note = Adenosine phosphorothiorate
  modified_base 38: mod_base = OTHER; note = Adenosine phosphorothiorate
  modified_base 41: mod_base = OTHER; note = 2'-fluorouridine
  modified_base 42: mod_base = OTHER; note = 2'-Omethylguanosine
  modified_base 43: mod_base = OTHER; note = 2'-Omethyladenosine
  modified_base 44: mod_base = OTHER; note = 2'-fluoroguanosine
  modified_base 49: mod_base = OTHER; note = 2'-Omethylcytosine
  modified_base 50: mod_base = OTHER; note = 2'-Omethyladenosine
  modified_base 52: mod_base = OTHER; note = 2'-Omethylguanosine
  modified_base 54: mod_base = OTHER; note = Uridine phosphorothiorate
  modified_base 55: mod_base = OTHER; note = Uridine phosphorothiorate
  modified_base 61: mod_base = OTHER; note = 2'-Omethylcytosine
  modified_base 65: mod_base = OTHER; note = 2'-Omethylguanosine
  modified_base 73: mod_base = OTHER; note = 2'-Omethylguanosine

SEQ ID NO: 9668 - RNA, 76 nt, synthetic construct; identical to SEQ ID NO: 3490
  source 1..76: mol_type = other RNA
  modified_base 1: mod_base = OTHER; note = 2'-Omethylguanosine
  modified_base 17: mod_base = OTHER; note = 2'-Omethylguanosine
  modified_base 18: mod_base = OTHER; note = 2'-Omethylguanosine
  modified_base 50: mod_base = OTHER; note = 2'-Omethylcytosine
  modified_base 52: mod_base = OTHER; note = 2'-Omethylguanosine
  modified_base 73: mod_base = OTHER; note = 2'-Omethylguanosine

SEQ ID NO: 9669 - RNA, 86 nt, synthetic construct; identical to SEQ ID NO: 3290
  source 1..86: mol_type = other RNA
  modified_base 41: mod_base = OTHER; note = 2'-fluorocytosine

SEQ ID NO: 9670 - RNA, 85 nt, synthetic construct; identical to SEQ ID NO: 3288
  source 1..85: mol_type = other RNA
  modified_base 1: mod_base = OTHER; note = 2'-fluorocytosine phosphorothiorate
  modified_base 13: mod_base = OTHER; note = Adenosine phosphorothiorate
  modified_base 30: mod_base = OTHER; note = 2'-fluoroadenosine
  modified_base 52: mod_base = OTHER; note = 2'-fluoroguanosine
  modified_base 53: mod_base = OTHER; note = 2'-fluorouridine
  modified_base 57: mod_base = OTHER; note = 2'-Omethylcytosine
  modified_base 73: mod_base = OTHER; note = Adenosine phosphorothiorate
  modified_base 84: mod_base = OTHER; note = 2'-Omethylcytosine

SEQ ID NO: 9671 - RNA, 76 nt, synthetic construct; identical to SEQ ID NO: 625
  source 1..76: mol_type = other RNA
  modified_base 1: mod_base = OTHER; note = 2'-Omethylguanosine
  modified_base 2: mod_base = OTHER; note = 2'-Omethylguanosine
  modified_base 3: mod_base = OTHER; note = 2'-Omethylcytosine
  modified_base 4: mod_base = OTHER; note = 2'-Omethyluridine
  modified_base 5: mod_base = OTHER; note = 2'-Omethylcytosine
  modified_base 6: mod_base = OTHER; note = 2'-Omethylcytosine
  modified_base 9: mod_base = OTHER; note = Guanosine phosphorothiorate
  modified_base 10: mod_base = OTHER; note = 2'-Omethylguanosine
  modified_base 11: mod_base = OTHER; note = 2'-Omethylcytosine
  modified_base 12: mod_base = OTHER; note = 2'-Omethylguanosine
  modified_base 13: mod_base = OTHER; note = 2'-Omethylcytosine
  modified_base 14: mod_base = OTHER; note = 2'-Omethyladenosine
  modified_base 15: mod_base = OTHER; note = 2'-Omethyladenosine
  modified_base 16: mod_base = OTHER; note = 2'-Omethyluridine
  modified_base 17: mod_base = OTHER; note = 2'-Omethylguanosine
  modified_base 18: mod_base = OTHER; note = 2'-Omethylguanosine
  modified_base 19: mod_base = OTHER; note = Adenosine phosphorothiorate
  modified_base 21: mod_base = OTHER; note = 2'-fluoroadenosine phosphorothiorate
  modified_base 22: mod_base = OTHER; note = 2'-Omethylguanosine
  modified_base 23: mod_base = OTHER; note = 2'-Omethylcytosine
  modified_base 24: mod_base = OTHER; note = 2'-Omethylguanosine
  modified_base 25: mod_base = OTHER; note = 2'-Omethylcytosine
  modified_base 26: mod_base = OTHER; note = Adenosine phosphorothiorate
  modified_base 29: mod_base = OTHER; note = 2'-fluoroguanosine phosphorothiorate
  modified_base 31: mod_base = OTHER; note = 2'-Omethyladenosine phosphorothiorate
  modified_base 32: mod_base = OTHER; note = 2'-Omethylcytosine phosphorothiorate
  modified_base 33: mod_base = OTHER; note = 2'-fluorouridine
  modified_base 35: mod_base = OTHER; note = Cytosine phosphorothiorate
  modified_base 36: mod_base = OTHER; note = 2'-Omethyladenosine phosphorothiorate
  modified_base 37: mod_base = OTHER; note = Adenosine phosphorothiorate
  modified_base 38: mod_base = OTHER; note = Adenosine phosphorothiorate
  modified_base 39: mod_base = OTHER; note = 2'-Omethyluridine phosphorothiorate
  modified_base 40: mod_base = OTHER; note = 2'-Omethyluridine
  modified_base 41: mod_base = OTHER; note = 2'-fluorocytosine
  modified_base 42: mod_base = OTHER; note = Adenosine phosphorothiorate
  modified_base 44: mod_base = OTHER; note = 2'-Omethyladenosine
  modified_base 45: mod_base = OTHER; note = Guanosine phosphorothiorate
  modified_base 47: mod_base = OTHER; note = Uridine phosphorothiorate
  modified_base 49: mod_base = OTHER; note = 2'-Omethylcytosine
  modified_base 50: mod_base = OTHER; note = 2'-Omethylcytosine
  modified_base 51: mod_base = OTHER; note = 2'-Omethylguanosine phosphorothiorate
  modified_base 52: mod_base = OTHER; note = 2'-Omethylguanosine
  modified_base 53: mod_base = OTHER; note = 2'-fluoroguanosine
  modified_base 54: mod_base = OTHER; note = 2'-Omethyluridine
  modified_base 55: mod_base = OTHER; note = Uridine phosphorothiorate
  modified_base 56: mod_base = OTHER; note = Cytosine phosphorothiorate
  modified_base 57: mod_base = OTHER; note = 2'-Omethylguanosine
  modified_base 59: mod_base = OTHER; note = 2'-Omethylguanosine
  modified_base 60: mod_base = OTHER; note = 2'-Omethyluridine phosphorothiorate
  modified_base 61: mod_base = OTHER; note = 2'-Omethylcytosine phosphorothiorate
  modified_base 62: mod_base = OTHER; note = 2'-Omethylcytosine
  modified_base 63: mod_base = OTHER; note = 2'-fluorocytosine
  modified_base 64: mod_base = OTHER; note = 2'-Omethylguanosine
  modified_base 65: mod_base = OTHER; note = 2'-Omethylguanosine phosphorothiorate
  modified_base 66: mod_base = OTHER; note = Cytosine phosphorothiorate
  modified_base 67: mod_base = OTHER; note = 2'-Omethylguanosine phosphorothiorate
  modified_base 68: mod_base = OTHER; note = 2'-Omethylguanosine
  modified_base 69: mod_base = OTHER; note = 2'-fluoroadenosine
  modified_base 70: mod_base = OTHER; note = 2'-Omethylguanosine phosphorothiorate
  modified_base 71: mod_base = OTHER; note = 2'-Omethyluridine phosphorothiorate
  modified_base 73: mod_base = OTHER; note = 2'-Omethylguanosine
  modified_base 74: mod_base = OTHER; note = 2'-fluorocytosine phosphorothiorate
  modified_base 75: mod_base = OTHER; note = 2'-fluorocytosine phosphorothiorate
  modified_base 76: mod_base = OTHER; note = 2'-Omethyladenosine

SEQ ID NO: 9672 - RNA, 75 nt, synthetic construct; identical to SEQ ID NO: 3311
  source 1..75: mol_type = other RNA
  modified_base 1: mod_base = OTHER; note = 2'-Omethylguanosine phosphorothiorate
  modified_base 2: mod_base = OTHER; note = 2'-Omethylguanosine phosphorothiorate
  modified_base 12: mod_base = OTHER; note = 2'-Omethylguanosine
  modified_base 13: mod_base = OTHER; note = Uridine phosphorothiorate
  modified_base 14: mod_base = OTHER; note = 2'-Omethyladenosine
  modified_base 18: mod_base = OTHER; note = Guanosine phosphorothiorate
  modified_base 20: mod_base = OTHER; note = Adenosine phosphorothiorate
  modified_base 21: mod_base = OTHER; note = 2'-fluoroadenosine
  modified_base 34: mod_base = OTHER; note = 2'-fluorocytosine
  modified_base 37: mod_base = OTHER; note = Adenosine phosphorothiorate
  modified_base 39: mod_base = OTHER; note = 2'-fluorouridine
  modified_base 63: mod_base = OTHER; note = Guanosine phosphorothiorate
  modified_base 64: mod_base = OTHER; note = 2'-fluoroguanosine
  modified_base 73: mod_base = OTHER; note = Cytosine phosphorothiorate

SEQ ID NO: 9673 - RNA, 76 nt, synthetic construct; identical to SEQ ID NO: 3289
  source 1..76: mol_type = other RNA
  modified_base 1: mod_base = OTHER; note = 2'-Omethylguanosine
  modified_base 2: mod_base = OTHER; note = 2'-Omethylcytosine
  modified_base 3: mod_base = OTHER; note = 2'-Omethylcytosine
  modified_base 4: mod_base = OTHER; note = 2'-Omethyluridine
  modified_base 5: mod_base = OTHER; note = 2'-Omethylguanosine
  modified_base 6: mod_base = OTHER; note = 2'-Omethylguanosine
  modified_base 14: mod_base = OTHER; note = 2'-Omethyladenosine
  modified_base 15: mod_base = OTHER; note = 2'-Omethylguanosine
  modified_base 16: mod_base = OTHER; note = 2'-Omethyluridine
  modified_base 18: mod_base = OTHER; note = 2'-Omethylguanosine
  modified_base 19: mod_base = OTHER; note = 2'-Omethylguanosine
  modified_base 25: mod_base = OTHER; note = 2'-Omethylcytosine
  modified_base 41: mod_base = OTHER; note = 2'-fluorouridine
  modified_base 42: mod_base = OTHER; note = 2'-Omethylguanosine
  modified_base 43: mod_base = OTHER; note = 2'-Omethyladenosine
  modified_base 44: mod_base = OTHER; note = 2'-fluoroguanosine
  modified_base 49: mod_base = OTHER; note = 2'-Omethylcytosine
  modified_base 50: mod_base = OTHER; note = 2'-Omethyladenosine
  modified_base 52: mod_base = OTHER; note = 2'-Omethylguanosine
  modified_base 54: mod_base = OTHER; note = 2'-Omethyluridine
  modified_base 55: mod_base = OTHER; note = Uridine phosphorothiorate
  modified_base 56: mod_base = OTHER; note = 2'-Omethylcytosine
  modified_base 57: mod_base = OTHER; note = 2'-fluoroadenosine
  modified_base 59: mod_base = OTHER; note = 2'-Omethylguanosine
  modified_base 61: mod_base = OTHER; note = 2'-Omethylcytosine
  modified_base 65: mod_base = OTHER; note = 2'-Omethylguanosine
  modified_base 73: mod_base = OTHER; note = 2'-Omethylguanosine

SEQ ID NO: 9674 - RNA, 75 nt, synthetic construct; identical to SEQ ID NO: 3299
  source 1..75: mol_type = other RNA
  modified_base 11: mod_base = OTHER; note = Uridine phosphorothiorate
  modified_base 16: mod_base = OTHER; note = 2'-fluorocytosine
  modified_base 20: mod_base = OTHER; note = 2'-fluoroadenosine
  modified_base 21: mod_base = OTHER; note = 2'-fluoroguanosine
  modified_base 28: mod_base = OTHER; note = 2'-Omethyladenosine phosphorothiorate
  modified_base 40: mod_base = OTHER; note = 2'-fluorouridine phosphorothiorate
  modified_base 46: mod_base = OTHER; note = 2'-fluorouridine
  modified_base 49: mod_base = OTHER; note = 2'-fluoroadenosine phosphorothiorate
  modified_base 60: mod_base = OTHER; note = 2'-fluorocytosine
  modified_base 73: mod_base = OTHER; note = Cytosine phosphorothiorate

SEQ ID NO: 9675 - RNA, 75 nt, synthetic construct; identical to SEQ ID NO: 1045
  source 1..75: mol_type = other RNA
  modified_base 1: mod_base = OTHER; note = 2'-Omethylguanosine phosphorothiorate
  modified_base 2: mod_base = OTHER; note = 2'-Omethylguanosine
  modified_base 4: mod_base = OTHER; note = Uridine phosphorothiorate
  modified_base 11: mod_base = OTHER; note = Uridine phosphorothiorate
  modified_base 12: mod_base = OTHER; note = 2'-fluoroguanosine
  modified_base 18: mod_base = OTHER; note = 2'-fluoroguanosine
  modified_base 19: mod_base = OTHER; note = 2'-fluorouridine
  modified_base 20: mod_base = OTHER; note = 2'-fluoroadenosine phosphorothiorate
  modified_base 21: mod_base = OTHER; note = 2'-fluoroadenosine
  modified_base 22: mod_base = OTHER; note = Guanosine phosphorothiorate
  modified_base 23: mod_base = OTHER; note = 2'-fluorocytosine
  modified_base 31: mod_base = OTHER; note = 2'-Omethyladenosine
  modified_base 38: mod_base = OTHER; note = 2'-fluoroadenosine phosphorothiorate
  modified_base 41: mod_base = OTHER; note = 2'-fluorocytosine
  modified_base 44: mod_base = OTHER; note = 2'-fluorocytosine
  modified_base 53: mod_base = OTHER; note = 2'-fluorouridine
  modified_base 59: mod_base = OTHER; note = 2'-fluorouridine
  modified_base 64: mod_base = OTHER; note = 2'-fluoroguanosine
  modified_base 65: mod_base = OTHER; note = 2'-fluorouridine
  modified_base 69: mod_base = OTHER; note = 2'-fluoroadenosine
  modified_base 72: mod_base = OTHER; note = Uridine phosphorothiorate
  modified_base 73: mod_base = OTHER; note = Cytosine phosphorothiorate

SEQ ID NO: 9676 - RNA, 75 nt, synthetic construct; identical to SEQ ID NO: 3311
  source 1..75: mol_type = other RNA
  modified_base 1: mod_base = OTHER; note = 2'-Omethylguanosine phosphorothiorate
  modified_base 2: mod_base = OTHER; note = 2'-Omethylguanosine phosphorothiorate
  modified_base 12: mod_base = OTHER; note = Guanosine phosphorothiorate
  modified_base 19: mod_base = OTHER; note = 2'-fluorouridine
  modified_base 22: mod_base = OTHER; note = 2'-fluoroguanosine
  modified_base 23: mod_base = OTHER; note = 2'-fluorocytosine
  modified_base 31: mod_base = OTHER; note = 2'-Omethyladenosine
  modified_base 50: mod_base = OTHER; note = Guanosine phosphorothiorate
  modified_base 51: mod_base = OTHER; note = 2'-fluoroadenosine
  modified_base 63: mod_base = OTHER; note = Guanosine phosphorothiorate
  modified_base 66: mod_base = OTHER; note = 2'-fluoroguanosine
  modified_base 73: mod_base = OTHER; note = Cytosine phosphorothiorate
  modified_base 74: mod_base = OTHER; note = 2'-Omethylcytosine

SEQ ID NO: 9677 - RNA, 75 nt, synthetic construct; identical to SEQ ID NO: 3299
  source 1..75: mol_type = other RNA
  modified_base 1: mod_base = OTHER; note = 2'-fluorocytosine
  modified_base 9: mod_base = OTHER; note = Guanosine phosphorothiorate
  modified_base 11: mod_base = OTHER; note = 2'-fluorouridine
  modified_base 15: mod_base = OTHER; note = 2'-fluorouridine phosphorothiorate
  modified_base 16: mod_base = OTHER; note = Cytosine phosphorothiorate
  modified_base 21: mod_base = OTHER; note = 2'-Omethylguanosine phosphorothiorate
  modified_base 23: mod_base = OTHER; note = 2'-fluoroguanosine
  modified_base 24: mod_base = OTHER; note = 2'-fluorocytosine phosphorothiorate
  modified_base 28: mod_base = OTHER; note = 2'-fluoroadenosine
  modified_base 29: mod_base = OTHER; note = 2'-fluoroguanosine
  modified_base 34: mod_base = OTHER; note = 2'-fluorouridine
  modified_base 39: mod_base = OTHER; note = 2'-fluorocytosine phosphorothiorate
  modified_base 46: mod_base = OTHER; note = 2'-fluorouridine
  modified_base 51: mod_base = OTHER; note = 2'-Omethylguanosine phosphorothiorate
  modified_base 61: mod_base = OTHER; note = 2'-fluorocytosine
  modified_base 71: mod_base = OTHER; note = 2'-fluorocytosine phosphorothiorate
  modified_base 74: mod_base = OTHER; note = Cytosine phosphorothiorate

SEQ ID NO: 9678 - RNA, 85 nt, synthetic construct; identical to SEQ ID NO: 3297
  source 1..85: mol_type = other RNA
  modified_base 1: mod_base = OTHER; note = 2'-Omethylguanosine
  modified_base 2: mod_base = OTHER; note = 2'-Omethylcytosine
  modified_base 3: mod_base = OTHER; note = 2'-Omethyluridine
  modified_base 4: mod_base = OTHER; note = 2'-Omethylguanosine
  modified_base 5: mod_base = OTHER; note = 2'-Omethyluridine

SEQ ID NO: 9679 - RNA, 76 nt, synthetic construct; identical to SEQ ID NO: 625
  source 1..76: mol_type = other RNA
  modified_base 1: mod_base = OTHER; note = 2'-fluoroguanosine
  modified_base 2: mod_base = OTHER; note = Guanosine phosphorothiorate
  modified_base 13: mod_base = OTHER; note = 2'-fluorocytosine phosphorothiorate
  modified_base 17: mod_base = OTHER; note = Guanosine phosphorothiorate
  modified_base 18: mod_base = OTHER; note = 2'-Omethylguanosine
  modified_base 22: mod_base = OTHER; note = 2'-fluoroguanosine
  modified_base 23: mod_base = OTHER; note = 2'-fluorocytosine
  modified_base 24: mod_base = OTHER; note = 2'-Omethylguanosine
  modified_base 28: mod_base = OTHER; note = 2'-Omethyluridine
  modified_base 29: mod_base = OTHER; note = Guanosine phosphorothiorate
  modified_base 30: mod_base = OTHER; note = 2'-Omethylguanosine
  modified_base 33: mod_base = OTHER; note = 2'-fluorouridine
  modified_base 34: mod_base = OTHER; note = Uridine phosphorothiorate
  modified_base 39: mod_base = OTHER; note = Uridine phosphorothiorate
  modified_base 40: mod_base = OTHER; note = 2'-Omethyluridine phosphorothiorate
  modified_base 41: mod_base = OTHER; note = 2'-Omethylcytosine
  modified_base 42: mod_base = OTHER; note = 2'-Omethyladenosine
  modified_base 44: mod_base = OTHER; note = 2'-fluoroadenosine phosphorothiorate
  modified_base 45: mod_base = OTHER; note = 2'-fluoroguanosine
  modified_base 46: mod_base = OTHER; note = 2'-Omethylguanosine
  modified_base 48: mod_base = OTHER; note = 2'-fluorouridine phosphorothiorate
  modified_base 49: mod_base = OTHER; note = 2'-fluorocytosine
  modified_base 52: mod_base = OTHER; note = 2'-fluoroguanosine phosphorothiorate
  modified_base 53: mod_base = OTHER; note = 2'-Omethylguanosine
  modified_base 56: mod_base = OTHER; note = Cytosine phosphorothiorate
  modified_base 57: mod_base = OTHER; note = 2'-Omethylguanosine
  modified_base 58: mod_base = OTHER; note = 2'-fluoroadenosine
  modified_base 59: mod_base = OTHER; note = 2'-fluoroguanosine phosphorothiorate
  modified_base 60: mod_base = OTHER; note = 2'-fluorouridine
  modified_base 61: mod_base = OTHER; note = 2'-fluorocytosine
  modified_base 67: mod_base = OTHER; note = 2'-Omethylguanosine
  modified_base 69: mod_base = OTHER; note = Adenosine phosphorothiorate
  modified_base 70: mod_base = OTHER; note = 2'-fluoroguanosine
  modified_base 71: mod_base = OTHER; note = 2'-Omethyluridine
  modified_base 72: mod_base = OTHER; note = 2'-fluorocytosine
  modified_base 74: mod_base = OTHER; note = 2'-Omethylcytosine

SEQ ID NO: 9680 - RNA, 76 nt, synthetic construct; identical to SEQ ID NO: 3318
  source 1..76: mol_type = other RNA
  modified_base 1: mod_base = OTHER; note = 2'-Omethylcytosine
  modified_base 4: mod_base = OTHER; note = 2'-Omethyluridine
  modified_base 10: mod_base = OTHER; note = 2'-Omethylguanosine
  modified_base 11: mod_base = OTHER; note = 2'-Omethylcytosine
  modified_base 12: mod_base = OTHER; note = 2'-Omethyluridine
  modified_base 13: mod_base = OTHER; note = 2'-Omethylcytosine
  modified_base 18: mod_base = OTHER; note = 2'-Omethylguanosine
  modified_base 19: mod_base = OTHER; note = 2'-Omethylguanosine
  modified_base 25: mod_base = OTHER; note = 2'-Omethylcytosine
  modified_base 29: mod_base = OTHER; note = 2'-Omethylguanosine
  modified_base 30: mod_base = OTHER; note = 2'-Omethylguanosine
  modified_base 45: mod_base = OTHER; note = 2'-Omethylguanosine
  modified_base 49: mod_base = OTHER; note = 2'-Omethylguanosine
  modified_base 50: mod_base = OTHER; note = 2'-Omethylcytosine
  modified_base 52: mod_base = OTHER; note = 2'-Omethylguanosine
  modified_base 56: mod_base = OTHER; note = 2'-Omethylcytosine
  modified_base 59: mod_base = OTHER; note = 2'-Omethyladenosine
  modified_base 61: mod_base = OTHER; note = 2'-Omethylcytosine
  modified_base 65: mod_base = OTHER; note = 2'-Omethylcytosine
  modified_base 66: mod_base = OTHER; note = 2'-Omethyluridine
  modified_base 68: mod_base = OTHER; note = 2'-Omethylguanosine
  modified_base 69: mod_base = OTHER; note = 2'-Omethyladenosine
  modified_base 71: mod_base = OTHER; note = 2'-Omethylguanosine
  modified_base 72: mod_base = OTHER; note = 2'-Omethylguanosine
  modified_base 73: mod_base = OTHER; note = 2'-Omethyladenosine

SEQ ID NO: 9681 - RNA, 76 nt, synthetic construct; identical to SEQ ID NO: 625
  source 1..76: mol_type = other RNA
  modified_base 61: mod_base = OTHER; note = 2'-Omethylcytosine
  modified_base 62: mod_base = OTHER; note = 2'-Omethylcytosine
  modified_base 63: mod_base = OTHER; note = 2'-fluorocytosine
  modified_base 64: mod_base = OTHER; note = 2'-Omethylguanosine
  modified_base 65: mod_base = OTHER; note = 2'-Omethylguanosine
  modified_base 66: mod_base = OTHER; note = 2'-Omethylcytosine
  modified_base 67: mod_base = OTHER; note = 2'-Omethylguanosine
  modified_base 68: mod_base = OTHER; note = 2'-Omethylguanosine

SEQ ID NO: 9682 - RNA, 85 nt, synthetic construct; identical to SEQ ID NO: 3297
  source 1..85: mol_type = other RNA
  modified_base 1: mod_base = OTHER; note = 2'-Omethylguanosine
  modified_base 16: mod_base = OTHER; note = 2'-Omethyluridine
  modified_base 17: mod_base = OTHER; note = 2'-Omethylguanosine
  modified_base 18: mod_base = OTHER; note = 2'-Omethylguanosine
  modified_base 63: mod_base = OTHER; note = 2'-Omethyluridine phosphorothiorate
  modified_base 64: mod_base = OTHER; note = Uridine phosphorothiorate
  modified_base 65: mod_base = OTHER; note = 2'-Omethylcytosine
  modified_base 66: mod_base = OTHER; note = 2'-fluoroguanosine
  modified_base 67: mod_base = OTHER; note = 2'-fluoroadenosine
  modified_base 68: mod_base = OTHER; note = 2'-Omethyladenosine
  modified_base 69: mod_base = OTHER; note = 2'-Omethyluridine
  modified_base 82: mod_base = OTHER; note = 2'-Omethylguanosine

SEQ ID NO: 9683 - RNA, 86 nt, synthetic construct; identical to SEQ ID NO: 3290
  source 1..86: mol_type = other RNA
  modified_base 1: mod_base = OTHER; note = 2'-Omethyladenosine
  modified_base 16: mod_base = OTHER; note = 2'-Omethyluridine
  modified_base 17: mod_base = OTHER; note = 2'-Omethylguanosine
  modified_base 18: mod_base = OTHER; note = 2'-Omethylguanosine
  modified_base 64: mod_base = OTHER; note = 2'-Omethyluridine
  modified_base 66: mod_base = OTHER; note = 2'-Omethylcytosine
  modified_base 69: mod_base = OTHER; note = 2'-Omethyladenosine
  modified_base 83: mod_base = OTHER; note = 2'-Omethyladenosine

SEQ ID NO: 9684 - RNA, 76 nt, synthetic construct; identical to SEQ ID NO: 625
  source 1..76: mol_type = other RNA
  modified_base 1: mod_base = OTHER; note = 2'-Omethylguanosine phosphorothiorate
  modified_base 2: mod_base = OTHER; note = 2'-Omethylguanosine phosphorothiorate
  modified_base 3: mod_base = OTHER; note = 2'-Omethylcytosine
  modified_base 4: mod_base = OTHER; note = 2'-Omethyluridine
  modified_base 5: mod_base = OTHER; note = 2'-Omethylcytosine
  modified_base 6: mod_base = OTHER; note = 2'-Omethylcytosine
  modified_base 10: mod_base = OTHER; note = 2'-Omethylguanosine
  modified_base 11: mod_base = OTHER; note = 2'-Omethylcytosine
  modified_base 12: mod_base = OTHER; note = 2'-Omethylguanosine
  modified_base 13: mod_base = OTHER; note = 2'-Omethylcytosine
  modified_base 14: mod_base = OTHER; note = 2'-Omethyladenosine
  modified_base 15: mod_base = OTHER; note = 2'-Omethyladenosine
  modified_base 16: mod_base = OTHER; note = 2'-Omethyluridine
  modified_base 17: mod_base = OTHER; note = 2'-Omethylguanosine
  modified_base 18: mod_base = OTHER; note = 2'-Omethylguanosine
  modified_base 19: mod_base = OTHER; note = 2'-Omethyladenosine
  modified_base 20: mod_base = OTHER; note = 2'-Omethyluridine
  modified_base 22: mod_base = OTHER; note = 2'-Omethylguanosine
  modified_base 23: mod_base = OTHER; note = 2'-Omethylcytosine
  modified_base 24: mod_base = OTHER; note = 2'-Omethylguanosine
  modified_base 25: mod_base = OTHER; note = 2'-Omethylcytosine
  modified_base 40: mod_base = OTHER; note = 2'-fluorouridine
  modified_base 41: mod_base = OTHER; note = 2'-fluorocytosine
  modified_base 42: mod_base = OTHER; note = 2'-fluoroadenosine
  modified_base 43: mod_base = OTHER; note = 2'-fluoroadenosine
  modified_base 48: mod_base = OTHER; note = 2'-fluorouridine
  modified_base 49: mod_base = OTHER; note = 2'-Omethylcytosine
  modified_base 50: mod_base = OTHER; note = 2'-Omethylcytosine
  modified_base 51: mod_base = OTHER; note = 2'-Omethylguanosine
  modified_base 52: mod_base = OTHER; note = 2'-Omethylguanosine
  modified_base 53: mod_base = OTHER; note = 2'-Omethylguanosine
  modified_base 54: mod_base = OTHER; note = 2'-Omethyluridine
  modified_base 61: mod_base = OTHER; note = 2'-Omethylcytosine
  modified_base 62: mod_base = OTHER; note = 2'-Omethylcytosine
  modified_base 63: mod_base = OTHER; note = 2'-fluorocytosine
  modified_base 64: mod_base = OTHER; note = 2'-Omethylguanosine
  modified_base 65: mod_base = OTHER; note = 2'-Omethylguanosine
  modified_base 66: mod_base = OTHER; note = 2'-Omethylcytosine
  modified_base 67: mod_base = OTHER; note = 2'-Omethylguanosine
  modified_base 68: mod_base = OTHER; note = 2'-Omethylguanosine
  modified_base 73: mod_base = OTHER; note = 2'-Omethylguanosine

SEQ ID NO: 9685 - RNA, 75 nt, synthetic construct; identical to SEQ ID NO: 1045
  source 1..75: mol_type = other RNA
  modified_base 1: mod_base = OTHER; note = 2'-Omethylguanosine phosphorothiorate
  modified_base 2: mod_base = OTHER; note = 2'-Omethylguanosine phosphorothiorate
  modified_base 12: mod_base = OTHER; note = Guanosine phosphorothiorate
  modified_base 13: mod_base = OTHER; note = 2'-Omethyluridine
  modified_base 73: mod_base = OTHER; note = Cytosine phosphorothiorate
  modified_base 74: mod_base = OTHER; note = 2'-Omethylcytosine phosphorothiorate
  modified_base 75: mod_base = OTHER; note = 2'-Omethyladenosine

SEQ ID NO: 9686 - RNA, 85 nt, synthetic construct; identical to SEQ ID NO: 3317
  source 1..85: mol_type = other RNA
  modified_base 1: mod_base = OTHER; note = 2'-Omethylguanosine phosphorothiorate
  modified_base 2: mod_base = OTHER; note = 2'-Omethylcytosine phosphorothiorate
  modified_base 3: mod_base = OTHER; note = 2'-Omethyluridine phosphorothiorate
  modified_base 4: mod_base = OTHER; note = 2'-Omethylguanosine phosphorothiorate
  modified_base 14: mod_base = OTHER; note = 2'-Omethyladenosine phosphorothiorate
  modified_base 17: mod_base = OTHER; note = 2'-fluoroguanosine
  modified_base 18: mod_base = OTHER; note = Guanosine phosphorothiorate
  modified_base 21: mod_base = OTHER; note = Adenosine phosphorothiorate
  modified_base 22: mod_base = OTHER; note = 2'-Omethyladenosine phosphorothiorate
  modified_base 23: mod_base = OTHER; note = 2'-fluoroguanosine
  modified_base 25: mod_base = OTHER; note = 2'-Omethylcytosine phosphorothiorate
  modified_base 27: mod_base = OTHER; note = Uridine phosphorothiorate
  modified_base 33: mod_base = OTHER; note = 2'-fluorouridine phosphorothiorate
  modified_base 35: mod_base = OTHER; note = 2'-fluorouridine
  modified_base 44: mod_base = OTHER; note = 2'-Omethyluridine
  modified_base 47: mod_base = OTHER; note = 2'-Omethylguanosine phosphorothiorate
  modified_base 54: mod_base = OTHER; note = 2'-Omethylcytosine
  modified_base 56: mod_base = OTHER; note = 2'-Omethylguanosine
  modified_base 62: mod_base = OTHER; note = 2'-fluoroguanosine
  modified_base 73: mod_base = OTHER; note = 2'-fluoroguanosine
  modified_base 74: mod_base = OTHER; note = 2'-fluorocytosine
  modified_base 81: mod_base = OTHER; note = 2'-Omethylcytosine phosphorothiorate

SEQ ID NO: 9687 - RNA, 85 nt, synthetic construct; identical to SEQ ID NO: 3286
  source 1..85: mol_type = other RNA
  modified_base 1: mod_base = OTHER; note = 2'-Omethylcytosine phosphorothiorate
  modified_base 8: mod_base = OTHER; note = Guanosine phosphorothiorate
  modified_base 25: mod_base = OTHER; note = 2'-Omethylguanosine
  modified_base 53: mod_base = OTHER; note = 2'-fluorouridine
  modified_base 57: mod_base = OTHER; note = Cytosine phosphorothiorate
  modified_base 58: mod_base = OTHER; note = Guanosine phosphorothiorate
  modified_base 84: mod_base = OTHER; note = Cytosine phosphorothiorate

SEQ ID NO: 9688 - RNA, 85 nt, synthetic construct; identical to SEQ ID NO: 3297
  source 1..85: mol_type = other RNA
  modified_base 1: mod_base = OTHER; note = 2'-Omethylguanosine phosphorothiorate
  modified_base 2: mod_base = OTHER; note = 2'-Omethylcytosine phosphorothiorate
  modified_base 83: mod_base = OTHER; note = Cytosine phosphorothiorate
  modified_base 84: mod_base = OTHER; note = Cytosine phosphorothiorate

SEQ ID NO: 9689 - RNA, 76 nt, synthetic construct; identical to SEQ ID NO: 3295
  source 1..76: mol_type = other RNA
  modified_base 1: mod_base = OTHER; note = 2'-Omethylcytosine
  modified_base 3: mod_base = OTHER; note = 2'-fluorouridine
  modified_base 26: mod_base = OTHER; note = Guanosine phosphorothiorate
  modified_base 30: mod_base = OTHER; note = 2'-fluoroguanosine phosphorothiorate
  modified_base 39: mod_base = OTHER; note = Uridine phosphorothiorate
  modified_base 47: mod_base = OTHER; note = 2'-fluorouridine phosphorothiorate
  modified_base 54: mod_base = OTHER; note = 2'-Omethyluridine
  modified_base 66: mod_base = OTHER; note = 2'-fluorouridine

SEQ ID NO: 9690 - RNA, 85 nt, synthetic construct; identical to SEQ ID NO: 3288
  source 1..85: mol_type = other RNA
  modified_base 1: mod_base = OTHER; note = 2'-Omethylcytosine phosphorothiorate
  modified_base 3: mod_base = OTHER; note = 2'-Omethyladenosine
  modified_base 17: mod_base = OTHER; note = Guanosine phosphorothiorate
  modified_base 35: mod_base = OTHER; note = Adenosine phosphorothiorate
  modified_base 43: mod_base = OTHER; note = 2'-Omethyluridine
  modified_base 46: mod_base = OTHER; note = 2'-Omethyladenosine
  modified_base 59: mod_base = OTHER; note = 2'-Omethyluridine
  modified_base 84: mod_base = OTHER; note = Cytosine phosphorothiorate

SEQ ID NO: 9691 - RNA, 76 nt, synthetic construct; identical to SEQ ID NO: 625
  source 1..76: mol_type = other RNA
  modified_base 1: mod_base = OTHER; note = 2'-Omethylguanosine phosphorothiorate
  modified_base 2: mod_base = OTHER; note = 2'-Omethylguanosine
  modified_base 17: mod_base = OTHER; note = 2'-Omethylguanosine
  modified_base 25: mod_base = OTHER; note = 2'-Omethylcytosine
  modified_base 33: mod_base = OTHER; note = 2'-fluorouridine
  modified_base 35: mod_base = OTHER; note = Cytosine phosphorothiorate
  modified_base 37: mod_base = OTHER; note = Adenosine phosphorothiorate
  modified_base 38: mod_base = OTHER; note = Adenosine phosphorothiorate
  modified_base 52: mod_base = OTHER; note = 2'-fluoroguanosine
  modified_base 62: mod_base = OTHER; note = 2'-Omethylcytosine
  modified_base 73: mod_base = OTHER; note = 2'-Omethylguanosine
  modified_base 75: mod_base = OTHER; note = 2'-fluorocytosine phosphorothiorate

SEQ ID NO: 9692 - RNA, 72 nt, synthetic construct; identical to SEQ ID NO: 3463
  source 1..72: mol_type = other RNA
  modified_base 1: mod_base = OTHER; note = 2'-Omethylguanosine
  modified_base 2: mod_base = OTHER; note = 2'-Omethyladenosine
  modified_base 3: mod_base = OTHER; note = 2'-Omethylcytosine
  modified_base 4: mod_base = OTHER; note = 2'-Omethylcytosine
  modified_base 5: mod_base = OTHER; note = 2'-Omethyluridine
  modified_base 6: mod_base = OTHER; note = 2'-Omethylcytosine

SEQ ID NO: 9693 - RNA, 76 nt, synthetic construct; identical to SEQ ID NO: 3318
  source 1..76: mol_type = other RNA
  modified_base 1: mod_base = OTHER; note = Cytosine phosphorothiorate
  modified_base 2: mod_base = OTHER; note = Cytosine phosphorothiorate
  modified_base 3: mod_base = OTHER; note = Uridine phosphorothiorate
  modified_base 50: mod_base = OTHER; note = Cytosine phosphorothiorate
  modified_base 51: mod_base = OTHER; note = Uridine phosphorothiorate
  modified_base 63: mod_base = OTHER; note = Guanosine phosphorothiorate
  modified_base 64: mod_base = OTHER; note = Guanosine phosphorothiorate
  modified_base 65: mod_base = OTHER; note = Cytosine phosphorothiorate
  modified_base 66: mod_base = OTHER; note = Uridine phosphorothiorate
  modified_base 67: mod_base = OTHER; note = Cytosine phosphorothiorate
  modified_base 69: mod_base = OTHER; note = Adenosine phosphorothiorate
  modified_base 70: mod_base = OTHER; note = Adenosine phosphorothiorate
  modified_base 74: mod_base = OTHER; note = Cytosine phosphorothiorate
  modified_base 75: mod_base = OTHER; note = Cytosine phosphorothiorate

SEQ ID NO: 9694 - RNA, 85 nt, synthetic construct; identical to SEQ ID NO: 3301
  source 1..85: mol_type = other RNA
  modified_base 1: mod_base = OTHER; note = 2'-Omethylguanosine phosphorothiorate
  modified_base 2: mod_base = OTHER; note = Cytosine phosphorothiorate
  modified_base 13: mod_base = OTHER; note = 2'-fluoroguanosine phosphorothiorate
  modified_base 14: mod_base = OTHER; note = 2'-Omethyladenosine
  modified_base 16: mod_base = OTHER; note = 2'-Omethyluridine
  modified_base 18: mod_base = OTHER; note = 2'-Omethylguanosine
  modified_base 26: mod_base = OTHER; note = Guanosine phosphorothiorate
  modified_base 28: mod_base = OTHER; note = 2'-Omethyluridine
  modified_base 36: mod_base = OTHER; note = 2'-fluoroadenosine
  modified_base 37: mod_base = OTHER; note = 2'-fluoroadenosine
  modified_base 41: mod_base = OTHER; note = Cytosine phosphorothiorate
  modified_base 45: mod_base = OTHER; note = 2'-Omethylguanosine
  modified_base 48: mod_base = OTHER; note = 2'-Omethylguanosine phosphorothiorate
  modified_base 55: mod_base = OTHER; note = 2'-Omethylcytosine phosphorothiorate
  modified_base 59: mod_base = OTHER; note = 2'-Omethylcytosine
  modified_base 61: mod_base = OTHER; note = 2'-Omethylguanosine
  modified_base 80: mod_base = OTHER; note = 2'-fluoroguanosine
  modified_base 81: mod_base = OTHER; note = Cytosine phosphorothiorate
  modified_base 82: mod_base = OTHER; note = 2'-Omethylguanosine
  modified_base 84: mod_base = OTHER; note = 2'-fluorocytosine

SEQ ID NO: 9695 - DNA, 74 bp, synthetic construct; identical to SEQ ID NO: 3384
  source 1..74: mol_type = other DNA
  modified_base 1: mod_base = OTHER; note = 2'-Omethylguanosine phosphorothiorate
  modified_base 2: mod_base = OTHER; note = 2'-Omethylguanosine phosphorothiorate
  modified_base 52: mod_base = OTHER; note = 2'-Omethylguanosine
  modified_base 63: mod_base = OTHER; note = Cytosine phosphorothiorate
  modified_base 73: mod_base = OTHER; note = 2'-Omethylguanosine
  misc_feature 1..63: note = RNA
  misc_feature 64: note = DNA
  misc_feature 65..74: note = RNA

SEQ ID NO: 9696 - RNA, 75 nt, synthetic construct; identical to SEQ ID NO: 1045
  source 1..75: mol_type = other RNA
  modified_base 1: mod_base = OTHER; note = 2'-Omethylguanosine
  modified_base 2: mod_base = OTHER; note = 2'-Omethylguanosine phosphorothiorate
  modified_base 7: mod_base = OTHER; note = Adenosine phosphorothiorate
  modified_base 14: mod_base = OTHER; note = 2'-fluoroadenosine
  modified_base 15: mod_base = OTHER; note = 2'-fluoroadenosine phosphorothiorate
  modified_base 22: mod_base = OTHER; note = 2'-fluoroguanosine
  modified_base 25: mod_base = OTHER; note = 2'-fluorocytosine
  modified_base 33: mod_base = OTHER; note = 2'-fluorouridine
  modified_base 40: mod_base = OTHER; note = 2'-Omethylcytosine
  modified_base 41: mod_base = OTHER; note = 2'-fluorocytosine
  modified_base 49: mod_base = OTHER; note = 2'-fluorocytosine
  modified_base 50: mod_base = OTHER; note = Guanosine phosphorothiorate
  modified_base 51: mod_base = OTHER; note = 2'-fluoroadenosine phosphorothiorate
  modified_base 54: mod_base = OTHER; note = 2'-Omethyluridine
  modified_base 61: mod_base = OTHER; note = 2'-fluorouridine
  modified_base 65: mod_base = OTHER; note = Uridine phosphorothiorate
  modified_base 66: mod_base = OTHER; note = 2'-fluoroguanosine

SEQ ID NO: 9697 - RNA, 76 nt, synthetic construct; identical to SEQ ID NO: 625
  source 1..76: mol_type = other RNA
  modified_base 2: mod_base = OTHER; note = Guanosine phosphorothiorate
  modified_base 3: mod_base = OTHER; note = 2'-Omethylcytosine
  modified_base 4: mod_base = OTHER; note = 2'-fluorouridine
  modified_base 5: mod_base = OTHER; note = Cytosine phosphorothiorate
  modified_base 6: mod_base = OTHER; note = 2'-fluorocytosine
  modified_base 11: mod_base = OTHER; note = Cytosine phosphorothiorate
  modified_base 12: mod_base = OTHER; note = 2'-fluoroguanosine
  modified_base 14: mod_base = OTHER; note = 2'-Omethyladenosine phosphorothiorate
  modified_base 16: mod_base = OTHER; note = Uridine phosphorothiorate
  modified_base 17: mod_base = OTHER; note = Guanosine phosphorothiorate
  modified_base 18: mod_base = OTHER; note = 2'-Omethylguanosine phosphorothiorate
  modified_base 19: mod_base = OTHER; note = Adenosine phosphorothiorate
  modified_base 24: mod_base = OTHER; note = 2'-Omethylguanosine
  modified_base 26: mod_base = OTHER; note = Adenosine phosphorothiorate
  modified_base 27: mod_base = OTHER; note = 2'-fluorouridine phosphorothiorate
  modified_base 28: mod_base = OTHER; note = 2'-Omethyluridine
  modified_base 30: mod_base = OTHER; note = 2'-fluoroguanosine
  modified_base 34: mod_base = OTHER; note = 2'-Omethyluridine phosphorothiorate
  modified_base 38: mod_base = OTHER; note = 2'-fluoroadenosine
  modified_base 39: mod_base = OTHER; note = Uridine phosphorothiorate
  modified_base 40: mod_base = OTHER; note = 2'-Omethyluridine
  modified_base 41: mod_base = OTHER; note = Cytosine phosphorothiorate
  modified_base 45: mod_base = OTHER; note = 2'-Omethylguanosine
  modified_base 48: mod_base = OTHER; note = Uridine phosphorothiorate
  modified_base 49: mod_base = OTHER; note = 2'-fluorocytosine
  modified_base 50: mod_base = OTHER; note = 2'-Omethylcytosine
  modified_base 52: mod_base = OTHER; note = 2'-Omethylguanosine
  modified_base 54: mod_base = OTHER; note = 2'-Omethyluridine
  modified_base 56: mod_base = OTHER; note = 2'-fluorocytosine
  modified_base 61: mod_base = OTHER; note = 2'-Omethylcytosine
  modified_base 64: mod_base = OTHER; note = 2'-fluoroguanosine phosphorothiorate
  modified_base 65: mod_base = OTHER; note = 2'-Omethylguanosine phosphorothiorate
  modified_base 66: mod_base = OTHER; note = Cytosine phosphorothiorate
  modified_base 67: mod_base = OTHER; note = 2'-fluoroguanosine
  modified_base 72: mod_base = OTHER; note = Cytosine phosphorothiorate
  modified_base 73: mod_base = OTHER; note = 2'-Omethylguanosine
  modified_base 74: mod_base = OTHER; note = 2'-fluorocytosine
  modified_base 76: mod_base = OTHER; note = 2'-fluoroadenosine

SEQ ID NO: 9698 - RNA, 75 nt, synthetic construct; identical to SEQ ID NO: 1045
  source 1..75: mol_type = other RNA
  modified_base 1: mod_base = OTHER; note = 2'-Omethylguanosine phosphorothiorate
  modified_base 2: mod_base = OTHER; note = 2'-Omethylguanosine phosphorothiorate
  modified_base 13: mod_base = OTHER; note = 2'-fluorouridine
  modified_base 14: mod_base = OTHER; note = 2'-fluoroadenosine
  modified_base 53: mod_base = OTHER; note = 2'-fluorouridine
  modified_base 58: mod_base = OTHER; note = 2'-Omethylguanosine
  modified_base 74: mod_base = OTHER; note = Cytosine phosphorothiorate
  modified_base 75: mod_base = OTHER; note = 2'-Omethyladenosine

SEQ ID NO: 9699 - RNA, 76 nt, synthetic construct; identical to SEQ ID NO: 625
  source 1..76: mol_type = other RNA
  modified_base 2: mod_base = OTHER; note = 2'-fluoroguanosine
  modified_base 3: mod_base = OTHER; note = Cytosine phosphorothiorate
  modified_base 4: mod_base = OTHER; note = 2'-Omethyluridine
  modified_base 5: mod_base = OTHER; note = 2'-Omethylcytosine
  modified_base 6: mod_base = OTHER; note = 2'-Omethylcytosine
  modified_base 7: mod_base = OTHER; note = Guanosine phosphorothiorate
  modified_base 11: mod_base = OTHER; note = 2'-fluorocytosine phosphorothiorate
  modified_base 12: mod_base = OTHER; note = 2'-Omethylguanosine
  modified_base 13: mod_base = OTHER; note = 2'-Omethylcytosine
  modified_base 14: mod_base = OTHER; note = 2'-Omethyladenosine
  modified_base 16: mod_base = OTHER; note = 2'-fluorouridine
  modified_base 18: mod_base = OTHER; note = 2'-Omethylguanosine phosphorothiorate
  modified_base 20: mod_base = OTHER; note = Uridine phosphorothiorate
  modified_base 22: mod_base = OTHER; note = 2'-Omethylguanosine
  modified_base 28: mod_base = OTHER; note = 2'-Omethyluridine phosphorothiorate
  modified_base 29: mod_base = OTHER; note = 2'-Omethylguanosine
  modified_base 33: mod_base = OTHER; note = 2'-fluorouridine
  modified_base 41: mod_base = OTHER; note = 2'-fluorocytosine
  modified_base 42: mod_base = OTHER; note = 2'-fluoroadenosine
  modified_base 47: mod_base = OTHER; note = 2'-fluorouridine
  modified_base 50: mod_base = OTHER; note = 2'-Omethylcytosine
  modified_base 51: mod_base = OTHER; note = 2'-Omethylguanosine
  modified_base 52: mod_base = OTHER; note = 2'-fluoroguanosine
  modified_base 55: mod_base = OTHER; note = Uridine phosphorothiorate
  modified_base 56: mod_base = OTHER; note = 2'-Omethylcytosine
  modified_base 61: mod_base = OTHER; note = Cytosine phosphorothiorate
  modified_base 62: mod_base = OTHER; note = 2'-Omethylcytosine
  modified_base 64: mod_base = OTHER; note = 2'-fluoroguanosine
  modified_base 68: mod_base = OTHER; note = 2'-Omethylguanosine phosphorothiorate
  modified_base 69: mod_base = OTHER; note = 2'-Omethyladenosine
  modified_base 71: mod_base = OTHER; note = 2'-Omethyluridine
  modified_base 72: mod_base = OTHER; note = 2'-fluorocytosine
  modified_base 73: mod_base = OTHER; note = 2'-Omethylguanosine

SEQ ID NO: 9700 - RNA, 85 nt, synthetic construct; identical to SEQ ID NO: 3317
  source 1..85: mol_type = other RNA
  modified_base 1: mod_base = OTHER; note = 2'-Omethylguanosine phosphorothiorate
  modified_base 5: mod_base = OTHER; note = 2'-Omethyluridine phosphorothiorate
  modified_base 44: mod_base = OTHER; note = 2'-Omethyluridine phosphorothiorate
  modified_base 58: mod_base = OTHER; note = 2'-fluoroguanosine
  modified_base 61: mod_base = OTHER; note = 2'-Omethylguanosine
  modified_base 63: mod_base = OTHER; note = 2'-Omethyluridine
  modified_base 83: mod_base = OTHER; note = Cytosine phosphorothiorate

SEQ ID NO: 9701 - RNA, 76 nt, synthetic construct; identical to SEQ ID NO: 625
  source 1..76: mol_type = other RNA
  modified_base 34: mod_base = OTHER; note = Thymine

SEQ ID NO: 9702 - RNA, 76 nt, synthetic construct; identical to SEQ ID NO: 625
  source 1..76: mol_type = other RNA
  modified_base 8: mod_base = OTHER; note = Thymine
  modified_base 27: mod_base = OTHER; note = Thymine
  modified_base 28: mod_base = OTHER; note = Thymine
  modified_base 39: mod_base = OTHER; note = Thymine
  modified_base 40: mod_base = OTHER; note = Thymine

SEQ ID NO: 9703 - RNA, 76 nt, synthetic construct; identical to SEQ ID NO: 625
  source 1..76: mol_type = other RNA
  modified_base 1: mod_base = OTHER; note = 2'-Omethylguanosine
  modified_base 2: mod_base = OTHER; note = 2'-Omethylguanosine
  modified_base 3: mod_base = OTHER; note = 2'-Omethylcytosine
  modified_base 4: mod_base = OTHER; note = 2'-Omethyluridine
  modified_base 5: mod_base = OTHER; note = 2'-Omethylcytosine
  modified_base 7: mod_base = OTHER; note = Guanosine phosphorothiorate
  modified_base 10: mod_base = OTHER; note = 2'-Omethylguanosine
  modified_base 11: mod_base = OTHER; note = 2'-Omethylcytosine
  modified_base 12: mod_base = OTHER; note = 2'-Omethylguanosine
  modified_base 13: mod_base = OTHER; note = 2'-Omethylcytosine
  modified_base 14: mod_base = OTHER; note = 2'-Omethyladenosine
  modified_base 15: mod_base = OTHER; note = Adenosine phosphorothiorate
  modified_base 16: mod_base = OTHER; note = 2'-Omethyluridine
  modified_base 18: mod_base = OTHER; note = 2'-fluoroguanosine phosphorothiorate
  modified_base 19: mod_base = OTHER; note = 2'-Omethyladenosine
  modified_base 21: mod_base = OTHER; note = 2'-fluoroadenosine phosphorothiorate
  modified_base 22: mod_base = OTHER; note = 2'-Omethylguanosine
  modified_base 23: mod_base = OTHER; note = 2'-Omethylcytosine
  modified_base 24: mod_base = OTHER; note = 2'-Omethylguanosine
  modified_base 25: mod_base = OTHER; note = 2'-Omethylcytosine
  modified_base 26: mod_base = OTHER; note = Adenosine phosphorothiorate
  modified_base 29: mod_base = OTHER; note = 2'-fluoroguanosine phosphorothiorate
  modified_base 30: mod_base = OTHER; note = 2'-Omethylguanosine phosphorothiorate
  modified_base 31: mod_base = OTHER; note = 2'-Omethyladenosine phosphorothiorate
  modified_base 33: mod_base = OTHER; note = 2'-fluorouridine
  modified_base 34: mod_base = OTHER; note = 2'-Omethyluridine phosphorothiorate
  modified_base 35: mod_base = OTHER; note = 2'-Omethylcytosine phosphorothiorate
  modified_base 36: mod_base = OTHER; note = 2'-Omethyladenosine phosphorothiorate
  modified_base 37: mod_base = OTHER; note = Adenosine phosphorothiorate
  modified_base 38: mod_base = OTHER; note = Adenosine phosphorothiorate
  modified_base 40: mod_base = OTHER; note = 2'-Omethyluridine
  modified_base 41: mod_base = OTHER; note = 2'-Omethylcytosine
  modified_base 42: mod_base = OTHER; note = Adenosine phosphorothiorate
  modified_base 44: mod_base = OTHER; note = 2'-Omethyladenosine
  modified_base 47: mod_base = OTHER; note = Uridine phosphorothiorate
  modified_base 48: mod_base = OTHER; note = 2'-fluorouridine
  modified_base 49: mod_base = OTHER; note = 2'-Omethylcytosine phosphorothiorate
  modified_base 50: mod_base = OTHER; note = 2'-Omethylcytosine
  modified_base 51: mod_base = OTHER; note = 2'-Omethylguanosine phosphorothiorate
  modified_base 52: mod_base = OTHER; note = 2'-Omethylguanosine
  modified_base 53: mod_base = OTHER; note = 2'-Omethylguanosine
  modified_base 54: mod_base = OTHER; note = Uridine phosphorothiorate
  modified_base 55: mod_base = OTHER; note = Uridine phosphorothiorate
  modified_base 56: mod_base = OTHER; note = Cytosine phosphorothiorate
  modified_base 57: mod_base = OTHER; note = 2'-fluoroguanosine phosphorothiorate
  modified_base 60: mod_base = OTHER; note = 2'-Omethyluridine phosphorothiorate
  modified_base 61: mod_base = OTHER; note = 2'-Omethylcytosine
  modified_base 62: mod_base = OTHER; note = 2'-Omethylcytosine
  modified_base 63: mod_base = OTHER; note = 2'-fluorocytosine
  modified_base 64: mod_base = OTHER; note = 2'-Omethylguanosine
  modified_base 65: mod_base = OTHER; note = 2'-Omethylguanosine phosphorothiorate
  modified_base 66: mod_base = OTHER; note = 2'-fluorocytosine
  modified_base 67: mod_base = OTHER; note = 2'-Omethylguanosine phosphorothiorate
  modified_base 68: mod_base = OTHER; note = 2'-Omethylguanosine
  modified_base 69: mod_base = OTHER; note = 2'-fluoroadenosine phosphorothiorate
  modified_base 70: mod_base = OTHER; note = 2'-fluoroguanosine phosphorothiorate
  modified_base 72: mod_base = OTHER; note = 2'-fluorocytosine phosphorothiorate
  modified_base 73: mod_base = OTHER; note = 2'-Omethylguanosine
  modified_base 74: mod_base = OTHER; note = 2'-fluorocytosine phosphorothiorate
  modified_base 75: mod_base = OTHER; note = 2'-fluorocytosine phosphorothiorate

SEQ ID NO: 9704 - RNA, 85 nt, synthetic construct; identical to SEQ ID NO: 3310
  source 1..85: mol_type = other RNA
  modified_base 1: mod_base = OTHER; note = 2'-Omethylcytosine
  modified_base 12: mod_base = OTHER; note = Guanosine phosphorothiorate
  modified_base 13: mod_base = OTHER; note = Adenosine phosphorothiorate
  modified_base 28: mod_base = OTHER; note = 2'-fluoroguanosine
  modified_base 30: mod_base = OTHER; note = 2'-fluoroadenosine
  modified_base 43: mod_base = OTHER; note = 2'-Omethyluridine
  modified_base 46: mod_base = OTHER; note = Adenosine phosphorothiorate
  modified_base 53: mod_base = OTHER; note = Uridine phosphorothiorate
  modified_base 54: mod_base = OTHER; note = 2'-fluorocytosine
  modified_base 56: mod_base = OTHER; note = 2'-Omethylguanosine
  modified_base 58: mod_base = OTHER; note = 2'-Omethylguanosine
  modified_base 72: mod_base = OTHER; note = 2'-fluorocytosine
  modified_base 76: mod_base = OTHER; note = 2'-fluorocytosine
  modified_base 83: mod_base = OTHER; note = Cytosine phosphorothiorate
  modified_base 84: mod_base = OTHER; note = Cytosine phosphorothiorate

SEQ ID NO: 9705 - RNA, 76 nt, synthetic construct; identical to SEQ ID NO: 3289
  source 1..76: mol_type = other RNA
  modified_base 1: mod_base = OTHER; note = 2'-Omethylguanosine
  modified_base 18: mod_base = OTHER; note = 2'-Omethylguanosine
  modified_base 19: mod_base = OTHER; note = 2'-Omethylguanosine
  modified_base 33: mod_base = OTHER; note = Uridine phosphorothiorate
  modified_base 34: mod_base = OTHER; note = 2'-Omethyluridine
  modified_base 35: mod_base = OTHER; note = Uridine phosphorothiorate
  modified_base 37: mod_base = OTHER; note = Adenosine phosphorothiorate
  modified_base 38: mod_base = OTHER; note = Adenosine phosphorothiorate
  modified_base 41: mod_base = OTHER; note = 2'-Omethyluridine
  modified_base 42: mod_base = OTHER; note = 2'-Omethylguanosine
  modified_base 43: mod_base = OTHER; note = 2'-Omethyladenosine
  modified_base 44: mod_base = OTHER; note = 2'-Omethylguanosine
  modified_base 50: mod_base = OTHER; note = 2'-Omethyladenosine
  modified_base 52: mod_base = OTHER; note = 2'-Omethylguanosine
  modified_base 73: mod_base = OTHER; note = 2'-Omethylguanosine

SEQ ID NO: 9706 - RNA, 73 nt, synthetic construct; identical to SEQ ID NO: 935
  source 1..73: mol_type = other RNA
  modified_base 1: mod_base = OTHER; note = 2'-Omethylguanosine phosphorothiorate
  modified_base 2: mod_base = OTHER; note = 2'-Omethylguanosine

SEQ ID NO: 9707 - RNA, 76 nt, synthetic construct; identical to SEQ ID NO: 625
  source 1..76: mol_type = other RNA
  modified_base 1: mod_base = OTHER; note = 2'-Omethylguanosine phosphorothiorate
  modified_base 2: mod_base = OTHER; note = 2'-Omethylguanosine
  modified_base 3: mod_base = OTHER; note = 2'-Omethylcytosine
  modified_base 4: mod_base = OTHER; note = 2'-Omethyluridine
  modified_base 5: mod_base = OTHER; note = 2'-Omethylcytosine
  modified_base 6: mod_base = OTHER; note = 2'-Omethylcytosine
  modified_base 10: mod_base = OTHER; note = 2'-Omethylguanosine
  modified_base 11: mod_base = OTHER; note = 2'-Omethylcytosine
  modified_base 12: mod_base = OTHER; note = 2'-Omethylguanosine
  modified_base 13: mod_base = OTHER; note = 2'-Omethylcytosine
  modified_base 14: mod_base = OTHER; note = 2'-Omethyladenosine
  modified_base 15: mod_base = OTHER; note = 2'-fluoroadenosine
  modified_base 16: mod_base = OTHER; note = 2'-Omethyluridine
  modified_base 17: mod_base = OTHER; note = 2'-Omethylguanosine
  modified_base 18: mod_base = OTHER; note = 2'-Omethylguanosine
  modified_base 19: mod_base = OTHER; note = 2'-fluoroadenosine
  modified_base 20: mod_base = OTHER; note = 2'-Omethyluridine
  modified_base 22: mod_base = OTHER; note = 2'-Omethylguanosine
  modified_base 23: mod_base = OTHER; note = 2'-Omethylcytosine
  modified_base 24: mod_base = OTHER; note = 2'-Omethylguanosine
  modified_base 25: mod_base = OTHER; note = 2'-Omethylcytosine
  modified_base 49: mod_base = OTHER; note = 2'-Omethylcytosine
  modified_base 50: mod_base = OTHER; note = 2'-Omethylcytosine
  modified_base 51: mod_base = OTHER; note = 2'-Omethylguanosine
  modified_base 52: mod_base = OTHER; note = 2'-Omethylguanosine
  modified_base 53: mod_base = OTHER; note = 2'-Omethylguanosine
  modified_base 54: mod_base = OTHER; note = 2'-Omethyluridine
  modified_base 56: mod_base = OTHER; note = 2'-Omethylcytosine
  modified_base 57: mod_base = OTHER; note = 2'-fluoroguanosine
  modified_base 59: mod_base = OTHER; note = 2'-Omethylguanosine
  modified_base 73: mod_base = OTHER; note = 2'-Omethylguanosine

SEQ ID NO: 9708 - RNA, 75 nt, synthetic construct; identical to SEQ ID NO: 3299
  source 1..75: mol_type = other RNA
  modified_base 10: mod_base = OTHER; note = 2'-Omethylcytosine phosphorothiorate
  modified_base 21: mod_base = OTHER; note = 2'-fluoroguanosine
  modified_base 26: mod_base = OTHER; note = Uridine phosphorothiorate
  modified_base 27: mod_base = OTHER; note = Cytosine phosphorothiorate
  modified_base 46: mod_base = OTHER; note = 2'-fluorouridine
  modified_base 47: mod_base = OTHER; note = 2'-fluorocytosine
  modified_base 53: mod_base = OTHER; note = 2'-fluorouridine
  modified_base 60: mod_base = OTHER; note = 2'-Omethylcytosine phosphorothiorate
  modified_base 72: mod_base = OTHER; note = 2'-Omethylguanosine
  modified_base 74: mod_base = OTHER; note = Cytosine phosphorothiorate

SEQ ID NO: 9709 - RNA, 85 nt, synthetic construct; identical to SEQ ID NO: 3288
  source 1..85: mol_type = other RNA
  modified_base 2: mod_base = OTHER; note = 2'-Omethylcytosine
  modified_base 29: mod_base = OTHER; note = 2'-fluoroguanosine
  modified_base 65: mod_base = OTHER; note = Cytosine phosphorothiorate
  modified_base 75: mod_base = OTHER; note = Uridine phosphorothiorate

SEQ ID NO: 9710 - RNA, 85 nt, synthetic construct; identical to SEQ ID NO: 3286
  source 1..85: mol_type = other RNA
  modified_base 1: mod_base = OTHER; note = 2'-Omethylcytosine
  modified_base 5: mod_base = OTHER; note = 2'-fluoroguanosine
  modified_base 19: mod_base = OTHER; note = 2'-Omethyluridine
  modified_base 27: mod_base = OTHER; note = 2'-fluorouridine
  modified_base 29: mod_base = OTHER; note = 2'-fluoroguanosine
  modified_base 30: mod_base = OTHER; note = 2'-fluoroadenosine
  modified_base 34: mod_base = OTHER; note = 2'-fluorouridine
  modified_base 35: mod_base = OTHER; note = Adenosine phosphorothiorate
  modified_base 36: mod_base = OTHER; note = 2'-fluoroguanosine phosphorothiorate
  modified_base 42: mod_base = OTHER; note = Adenosine phosphorothiorate
  modified_base 45: mod_base = OTHER; note = Guanosine phosphorothiorate
  modified_base 48: mod_base = OTHER; note = 2'-Omethyladenosine
  modified_base 50: mod_base = OTHER; note = 2'-fluoroadenosine
  modified_base 54: mod_base = OTHER; note = 2'-fluorocytosine
  modified_base 57: mod_base = OTHER; note = 2'-Omethylcytosine
  modified_base 62: mod_base = OTHER; note = 2'-fluoroguanosine phosphorothiorate
  modified_base 64: mod_base = OTHER; note = Uridine phosphorothiorate
  modified_base 68: mod_base = OTHER; note = 2'-fluoroadenosine phosphorothiorate
  modified_base 73: mod_base = OTHER; note = 2'-fluoroadenosine phosphorothiorate
  modified_base 77: mod_base = OTHER; note = Cytosine phosphorothiorate
  modified_base 84: mod_base = OTHER; note = Cytosine phosphorothiorate

SEQ ID NO: 9711 - DNA, 76 bp, synthetic construct; identical to SEQ ID NO: 1924
  source 1..76: mol_type = other DNA
  modified_base 1: mod_base = OTHER; note = 2'-Omethylguanosine phosphorothiorate
  modified_base 2: mod_base = OTHER; note = 2'-Omethylguanosine
  modified_base 3: mod_base = OTHER; note = 2'-Omethylcytosine
  modified_base 4: mod_base = OTHER; note = 2'-Omethyluridine
  modified_base 5: mod_base = OTHER; note = 2'-Omethylcytosine
  modified_base 6: mod_base = OTHER; note = 2'-Omethylcytosine
  modified_base 10: mod_base = OTHER; note = 2'-Omethylguanosine
  modified_base 11: mod_base = OTHER; note = 2'-Omethylcytosine
  modified_base 12: mod_base = OTHER; note = Guanosine phosphorothiorate
  modified_base 13: mod_base = OTHER; note = 2'-Omethylcytosine
  modified_base 14: mod_base = OTHER; note = 2'-Omethyladenosine
  modified_base 15: mod_base = OTHER; note = 2'-fluoroadenosine
  modified_base 16: mod_base = OTHER; note = 2'-Omethyluridine
  modified_base 17: mod_base = OTHER; note = Guanosine phosphorothiorate
  modified_base 18: mod_base = OTHER; note = 2'-Omethylguanosine
  modified_base 19: mod_base = OTHER; note = 2'-fluoroadenosine
  modified_base 20: mod_base = OTHER; note = 2'-Omethyluridine
  modified_base 21: mod_base = OTHER; note = Adenosine phosphorothiorate
  modified_base 23: mod_base = OTHER; note = 2'-Omethylcytosine
  modified_base 24: mod_base = OTHER; note = 2'-Omethylguanosine
  modified_base 25: mod_base = OTHER; note = Cytosine phosphorothiorate
  modified_base 26: mod_base = OTHER; note = Adenosine phosphorothiorate
  modified_base 27: mod_base = OTHER; note = 2'-O-(2-Methoxyethyl) thymine
  modified_base 33: mod_base = OTHER; note = 2'-fluorouridine
  modified_base 35: mod_base = OTHER; note = Cytosine phosphorothiorate
  modified_base 37: mod_base = OTHER; note = Adenosine phosphorothiorate
  modified_base 38: mod_base = OTHER; note = Adenosine phosphorothiorate
  modified_base 44: mod_base = OTHER; note = Adenosine phosphorothiorate
  modified_base 45: mod_base = OTHER; note = 2'-fluoroguanosine
  modified_base 49: mod_base = OTHER; note = 2'-Omethylcytosine
  modified_base 50: mod_base = OTHER; note = 2'-Omethylcytosine
  modified_base 51: mod_base = OTHER; note = Guanosine phosphorothiorate
  modified_base 52: mod_base = OTHER; note = 2'-Omethylguanosine
  modified_base 53: mod_base = OTHER; note = 2'-Omethylguanosine
  modified_base 54: mod_base = OTHER; note = 2'-Omethyluridine
  modified_base 56: mod_base = OTHER; note = 2'-Omethylcytosine
  modified_base 57: mod_base = OTHER; note = 2'-Omethylguanosine
  modified_base 61: mod_base = OTHER; note = 2'-Omethylcytosine
  modified_base 62: mod_base = OTHER; note = 2'-Omethylcytosine
  modified_base 63: mod_base = OTHER; note = 2'-fluorocytosine
  modified_base 64: mod_base = OTHER; note = 2'-Omethylguanosine
  modified_base 65: mod_base = OTHER; note = 2'-Omethylguanosine
  modified_base 66: mod_base = OTHER; note = 2'-Omethylcytosine
  modified_base 67: mod_base = OTHER; note = 2'-Omethylguanosine
  modified_base 68: mod_base = OTHER; note = 2'-Omethylguanosine
  modified_base 69: mod_base = OTHER; note = 2'-fluoroadenosine
  modified_base 71: mod_base = OTHER; note = 2'-Omethyluridine
  modified_base 73: mod_base = OTHER; note = 2'-Omethylguanosine
  modified_base 74: mod_base = OTHER; note = Cytosine phosphorothiorate
  modified_base 75: mod_base = OTHER; note = 2'-fluorocytosine phosphorothiorate
  misc_feature 1..21: note = RNA
  misc_feature 22: note = DNA
  misc_feature 23..76: note = RNA

SEQ ID NO: 9712 - DNA, 76 bp, synthetic construct; identical to SEQ ID NO: 1924
  source 1..76: mol_type = other DNA
  modified_base 1: mod_base = OTHER; note = 2'-Omethylguanosine
  modified_base 3: mod_base = OTHER; note = Cytosine phosphorothiorate
  modified_base 5: mod_base = OTHER; note = Cytosine phosphorothiorate
  modified_base 10: mod_base = OTHER; note = Guanosine phosphorothiorate
  modified_base 11: mod_base = OTHER; note = Cytosine phosphorothiorate
  modified_base 12: mod_base = OTHER; note = 2'-O-(2-Methoxyethyl) guanosine phosphorothiorate
  modified_base 15: mod_base = OTHER; note = Adenosine phosphorothiorate
  modified_base 19: mod_base = OTHER; note = Adenosine phosphorothiorate
  modified_base 21: mod_base = OTHER; note = 2'-O-(2-Methoxyethyl) adenosine
  modified_base 22: mod_base = OTHER; note = 2'-O-(2-Methoxyethyl) guanosine
  modified_base 28: mod_base = OTHER; note = 2'-Omethyluridine
  modified_base 31: mod_base = OTHER; note = Adenosine phosphorothiorate
  modified_base 32: mod_base = OTHER; note = 2'-fluorocytosine
  modified_base 46: mod_base = OTHER; note = Guanosine phosphorothiorate
  modified_base 48: mod_base = OTHER; note = 2'-fluorouridine phosphorothiorate
  modified_base 52: mod_base = OTHER; note = 2'-O-(2-Methoxyethyl) guanosine
  modified_base 55: mod_base = OTHER; note = Uridine phosphorothiorate
  modified_base 57: mod_base = OTHER; note = 2'-fluoroguanosine
  modified_base 59: mod_base = OTHER; note = Guanosine phosphorothiorate
  modified_base 60: mod_base = OTHER; note = 2'-fluorouridine
  modified_base 61: mod_base = OTHER; note = 2'-fluorocytosine
  modified_base 62: mod_base = OTHER; note = Cytosine phosphorothiorate
  modified_base 63: mod_base = OTHER; note = 2'-fluorocytosine
  modified_base 64: mod_base = OTHER; note = 2'-fluoroguanosine
  modified_base 65: mod_base = OTHER; note = Guanosine phosphorothiorate
  modified_base 66: mod_base = OTHER; note = 2'-O-(2-Methoxyethyl) 5-methylcytosine phosphorothiorate
  modified_base 67: mod_base = OTHER; note = 2'-fluoroguanosine
  modified_base 73: mod_base = OTHER; note = Guanosine phosphorothiorate
  modified_base 74: mod_base = OTHER; note = 2'-O-(2-Methoxyethyl) 5-methylcytosine
  misc_feature 1..5: note = RNA
  misc_feature 6: note = DNA
  misc_feature 7..19: note = RNA
  misc_feature 20: note = DNA
  misc_feature 21..24: note = RNA
  misc_feature 25: note = DNA
  misc_feature 26..46: note = RNA
  misc_feature 47: note = DNA
  misc_feature 48..76: note = RNA

SEQ ID NO: 9713 - RNA, 86 nt, synthetic construct; identical to SEQ ID NO: 3290
  source 1..86: mol_type = other RNA
  modified_base 1: mod_base = OTHER; note = 2'-Omethyladenosine
  modified_base 59: mod_base = OTHER; note = 2'-Omethylguanosine
  modified_base 60: mod_base = OTHER; note = 2'-Omethyluridine
  modified_base 61: mod_base = OTHER; note = 2'-Omethylguanosine
  modified_base 62: mod_base = OTHER; note = 2'-Omethylguanosine
  modified_base 63: mod_base = OTHER; note = 2'-Omethylguanosine
  modified_base 71: mod_base = OTHER; note = 2'-Omethylcytosine
  modified_base 72: mod_base = OTHER; note = 2'-Omethylcytosine
  modified_base 73: mod_base = OTHER; note = 2'-fluorocytosine
  modified_base 74: mod_base = OTHER; note = 2'-Omethyladenosine
  modified_base 75: mod_base = OTHER; note = 2'-Omethylcytosine
  modified_base 83: mod_base = OTHER; note = 2'-Omethyladenosine

SEQ ID NO: 9714 - RNA, 76 nt, synthetic construct; identical to SEQ ID NO: 625
  source 1..76: mol_type = other RNA
  modified_base 1: mod_base = OTHER; note = 2'-fluoroguanosine
  modified_base 4: mod_base = OTHER; note = 2'-Omethyluridine
  modified_base 5: mod_base = OTHER; note = 2'-Omethylcytosine
  modified_base 10: mod_base = OTHER; note = 2'-Omethylguanosine
  modified_base 12: mod_base = OTHER; note = Guanosine phosphorothiorate
  modified_base 14: mod_base = OTHER; note = 2'-Omethyladenosine
  modified_base 16: mod_base = OTHER; note = 2'-Omethyluridine
  modified_base 23: mod_base = OTHER; note = Cytosine phosphorothiorate
  modified_base 24: mod_base = OTHER; note = Guanosine phosphorothiorate
  modified_base 25: mod_base = OTHER; note = 2'-fluorocytosine
  modified_base 26: mod_base = OTHER; note = 2'-Omethyladenosine
  modified_base 29: mod_base = OTHER; note = 2'-fluoroguanosine
  modified_base 31: mod_base = OTHER; note = 2'-Omethyladenosine
  modified_base 32: mod_base = OTHER; note = 2'-fluorocytosine
  modified_base 33: mod_base = OTHER; note = 2'-fluorouridine
  modified_base 38: mod_base = OTHER; note = Adenosine phosphorothiorate
  modified_base 40: mod_base = OTHER; note = 2'-fluorouridine
  modified_base 41: mod_base = OTHER; note = Cytosine phosphorothiorate
  modified_base 43: mod_base = OTHER; note = 2'-Omethyladenosine
  modified_base 44: mod_base = OTHER; note = 2'-fluoroadenosine phosphorothiorate
  modified_base 47: mod_base = OTHER; note = Uridine phosphorothiorate
  modified_base 48: mod_base = OTHER; note = 2'-Omethyluridine
  modified_base 52: mod_base = OTHER; note = 2'-Omethylguanosine
  modified_base 53: mod_base = OTHER; note = Guanosine phosphorothiorate
  modified_base 54: mod_base = OTHER; note = 2'-Omethyluridine
  modified_base 55: mod_base = OTHER; note = Uridine phosphorothiorate
  modified_base 56: mod_base = OTHER; note = 2'-Omethylcytosine
  modified_base 59: mod_base = OTHER; note = 2'-fluoroguanosine
  modified_base 61: mod_base = OTHER; note = Cytosine phosphorothiorate
  modified_base 62: mod_base = OTHER; note = 2'-Omethylcytosine phosphorothiorate
  modified_base 63: mod_base = OTHER; note = 2'-Omethylcytosine
  modified_base 66: mod_base = OTHER; note = 2'-Omethylcytosine
  modified_base 69: mod_base = OTHER; note = 2'-Omethyladenosine
  modified_base 73: mod_base = OTHER; note = 2'-Omethylguanosine
  modified_base 75: mod_base = OTHER; note = Cytosine phosphorothiorate

SEQ ID NO: 9715 - RNA, 74 nt, synthetic construct; identical to SEQ ID NO: 766
  source 1..74: mol_type = other RNA
  modified_base 1: mod_base = OTHER; note = 2'-Omethylguanosine phosphorothiorate
  modified_base 2: mod_base = OTHER; note = 2'-Omethylguanosine phosphorothiorate
  modified_base 5: mod_base = OTHER; note = 2'-Omethylcytosine
  modified_base 61: mod_base = OTHER; note = 2'-fluorocytosine
  modified_base 73: mod_base = OTHER; note = 2'-Omethylguanosine

SEQ ID NO: 9716 - RNA, 85 nt, synthetic construct; identical to SEQ ID NO: 3297
  source 1..85: mol_type = other RNA
  modified_base 1: mod_base = OTHER; note = 2'-Omethylguanosine
  modified_base 7: mod_base = OTHER; note = 2'-fluoroadenosine phosphorothiorate
  modified_base 15: mod_base = OTHER; note = Guanosine phosphorothiorate
  modified_base 23: mod_base = OTHER; note = 2'-fluoroguanosine
  modified_base 34: mod_base = OTHER; note = 2'-fluorouridine
  modified_base 48: mod_base = OTHER; note = 2'-Omethylguanosine phosphorothiorate
  modified_base 60: mod_base = OTHER; note = 2'-Omethyladenosine

SEQ ID NO: 9717 - RNA, 85 nt, synthetic construct; identical to SEQ ID NO: 3317
  source 1..85: mol_type = other RNA
  modified_base 1: mod_base = OTHER; note = 2'-Omethylguanosine
  modified_base 7: mod_base = OTHER; note = 2'-fluoroadenosine phosphorothiorate
  modified_base 15: mod_base = OTHER; note = Guanosine phosphorothiorate
  modified_base 23: mod_base = OTHER; note = 2'-fluoroguanosine
  modified_base 34: mod_base = OTHER; note = 2'-fluorocytosine
  modified_base 48: mod_base = OTHER; note = 2'-Omethylguanosine phosphorothiorate
  modified_base 60: mod_base = OTHER; note = 2'-Omethyladenosine

SEQ ID NO: 9718 - RNA, 85 nt, synthetic construct; identical to SEQ ID NO: 3288
  source 1..85: mol_type = other RNA
  modified_base 1: mod_base = OTHER; note = 2'-Omethylcytosine
  modified_base 25: mod_base = OTHER; note = 2'-fluoroguanosine
  modified_base 27: mod_base = OTHER; note = 2'-fluorouridine
  modified_base 28: mod_base = OTHER; note = 2'-fluoroguanosine phosphorothiorate
  modified_base 29: mod_base = OTHER; note = 2'-fluoroguanosine
  modified_base 30: mod_base = OTHER; note = 2'-fluoroadenosine
  modified_base 34: mod_base = OTHER; note = 2'-fluorocytosine
  modified_base 35: mod_base = OTHER; note = Adenosine phosphorothiorate
  modified_base 39: mod_base = OTHER; note = Cytosine phosphorothiorate
  modified_base 45: mod_base = OTHER; note = Guanosine phosphorothiorate
  modified_base 48: mod_base = OTHER; note = 2'-Omethyladenosine
  modified_base 51: mod_base = OTHER; note = Uridine phosphorothiorate
  modified_base 54: mod_base = OTHER; note = 2'-Omethylcytosine
  modified_base 55: mod_base = OTHER; note = Cytosine phosphorothiorate
  modified_base 57: mod_base = OTHER; note = 2'-Omethylcytosine
  modified_base 58: mod_base = OTHER; note = Guanosine phosphorothiorate
  modified_base 60: mod_base = OTHER; note = 2'-fluoroguanosine phosphorothiorate
  modified_base 71: mod_base = OTHER; note = 2'-Omethylcytosine
  modified_base 73: mod_base = OTHER; note = 2'-fluoroadenosine phosphorothiorate
  modified_base 84: mod_base = OTHER; note = 2'-Omethylcytosine

SEQ ID NO: 9719 - RNA, 76 nt, synthetic construct; identical to SEQ ID NO: 625
  source 1..76: mol_type = other RNA
  modified_base 1: mod_base = OTHER; note = 2'-Omethylguanosine
  modified_base 2: mod_base = OTHER; note = 2'-Omethylguanosine
  modified_base 3: mod_base = OTHER; note = 2'-Omethylcytosine
  modified_base 4: mod_base = OTHER; note = 2'-Omethyluridine
  modified_base 5: mod_base = OTHER; note = 2'-Omethylcytosine
  modified_base 6: mod_base = OTHER; note = 2'-Omethylcytosine
  modified_base 10: mod_base = OTHER; note = 2'-Omethylguanosine
  modified_base 11: mod_base = OTHER; note = 2'-Omethylcytosine
  modified_base 12: mod_base = OTHER; note = 2'-Omethylguanosine
  modified_base 13: mod_base = OTHER; note = 2'-Omethylcytosine
  modified_base 14: mod_base = OTHER; note = 2'-Omethyladenosine
  modified_base 15: mod_base = OTHER; note = 2'-Omethyladenosine
  modified_base 16: mod_base = OTHER; note = 2'-Omethyluridine
  modified_base 17: mod_base = OTHER; note = 2'-Omethylguanosine
  modified_base 18: mod_base = OTHER; note = 2'-Omethylguanosine
  modified_base 20: mod_base = OTHER; note = Uridine phosphorothiorate
  modified_base 21: mod_base = OTHER; note = 2'-fluoroadenosine phosphorothiorate
  modified_base 22: mod_base = OTHER; note = 2'-Omethylguanosine
  modified_base 23: mod_base = OTHER; note = 2'-Omethylcytosine
  modified_base 24: mod_base = OTHER; note = 2'-Omethylguanosine phosphorothiorate
  modified_base 26: mod_base = OTHER; note = Adenosine phosphorothiorate
  modified_base 28: mod_base = OTHER; note = 2'-Omethyluridine
  modified_base 29: mod_base = OTHER; note = Guanosine phosphorothiorate
  modified_base 30: mod_base = OTHER; note = 2'-Omethylguanosine phosphorothiorate
  modified_base 33: mod_base = OTHER; note = 2'-fluorouridine
  modified_base 35: mod_base = OTHER; note = 2'-Omethylcytosine phosphorothiorate
  modified_base 37: mod_base = OTHER; note = Adenosine phosphorothiorate
  modified_base 38: mod_base = OTHER; note = Adenosine phosphorothiorate
  modified_base 40: mod_base = OTHER; note = 2'-Omethyluridine phosphorothiorate
  modified_base 41: mod_base = OTHER; note = 2'-fluorocytosine
  modified_base 42: mod_base = OTHER; note = Adenosine phosphorothiorate
  modified_base 43: mod_base = OTHER; note = 2'-Omethyladenosine
  modified_base 44: mod_base = OTHER; note = 2'-Omethyladenosine
  modified_base 48: mod_base = OTHER; note = 2'-fluorouridine
  modified_base 49: mod_base = OTHER; note = 2'-Omethylcytosine phosphorothiorate
  modified_base 50: mod_base = OTHER; note = 2'-Omethylcytosine
  modified_base 51: mod_base = OTHER; note = 2'-Omethylguanosine
  modified_base 52: mod_base = OTHER; note = 2'-Omethylguanosine
  modified_base 53: mod_base = OTHER; note = 2'-Omethylguanosine phosphorothiorate
  modified_base 55: mod_base = OTHER; note = Uridine phosphorothiorate
  modified_base 57: mod_base = OTHER; note = 2'-Omethylguanosine
  modified_base 59: mod_base = OTHER; note = 2'-Omethylguanosine
  modified_base 61: mod_base = OTHER; note = 2'-Omethylcytosine phosphorothiorate
  modified_base 62: mod_base = OTHER; note = 2'-Omethylcytosine
  modified_base 63: mod_base = OTHER; note = 2'-fluorocytosine
  modified_base 64: mod_base = OTHER; note = 2'-Omethylguanosine phosphorothiorate
  modified_base 65: mod_base = OTHER; note = 2'-Omethylguanosine
  modified_base 66: mod_base = OTHER; note = 2'-Omethylcytosine
  modified_base 67: mod_base = OTHER; note = 2'-Omethylguanosine phosphorothiorate
  modified_base 68: mod_base = OTHER; note = 2'-Omethylguanosine
  modified_base 69: mod_base = OTHER; note = 2'-fluoroadenosine phosphorothiorate
  modified_base 72: mod_base = OTHER; note = 2'-fluorocytosine phosphorothiorate
  modified_base 73: mod_base = OTHER; note = 2'-Omethylguanosine
  modified_base 74: mod_base = OTHER; note = 2'-fluorocytosine phosphorothiorate
  modified_base 75: mod_base = OTHER; note = 2'-fluorocytosine phosphorothiorate
  modified_base 76: mod_base = OTHER; note = 2'-Omethyladenosine

SEQ ID NO: 9720 - RNA, 75 nt, synthetic construct; identical to SEQ ID NO: 1045
  source 1..75: mol_type = other RNA
  modified_base 1: mod_base = OTHER; note = 2'-Omethylguanosine phosphorothiorate
  modified_base 2: mod_base = OTHER; note = 2'-Omethylguanosine phosphorothiorate
  modified_base 3: mod_base = OTHER; note = 2'-Omethyluridine
  modified_base 4: mod_base = OTHER; note = 2'-Omethyluridine
  modified_base 5: mod_base = OTHER; note = 2'-Omethylcytosine
  modified_base 6: mod_base = OTHER; note = 2'-Omethylcytosine
  modified_base 10: mod_base = OTHER; note = 2'-Omethylguanosine
  modified_base 11: mod_base = OTHER; note = 2'-Omethyluridine
  modified_base 12: mod_base = OTHER; note = 2'-Omethylguanosine
  modified_base 13: mod_base = OTHER; note = 2'-Omethyluridine
  modified_base 16: mod_base = OTHER; note = 2'-Omethyluridine
  modified_base 17: mod_base = OTHER; note = 2'-Omethylguanosine
  modified_base 18: mod_base = OTHER; note = 2'-Omethylguanosine
  modified_base 33: mod_base = OTHER; note = 2'-fluorouridine
  modified_base 35: mod_base = OTHER; note = Uridine phosphorothiorate
  modified_base 37: mod_base = OTHER; note = Adenosine phosphorothiorate
  modified_base 38: mod_base = OTHER; note = Adenosine phosphorothiorate
  modified_base 44: mod_base = OTHER; note = 2'-Omethylcytosine
  modified_base 45: mod_base = OTHER; note = 2'-Omethylguanosine
  modified_base 46: mod_base = OTHER; note = 2'-fluoroadenosine
  modified_base 47: mod_base = OTHER; note = 2'-fluorouridine
  modified_base 55: mod_base = OTHER; note = 2'-Omethylcytosine
  modified_base 58: mod_base = OTHER; note = 2'-Omethylguanosine
  modified_base 60: mod_base = OTHER; note = 2'-Omethylcytosine
  modified_base 61: mod_base = OTHER; note = 2'-Omethyluridine
  modified_base 62: mod_base = OTHER; note = 2'-fluorocytosine
  modified_base 63: mod_base = OTHER; note = 2'-Omethylguanosine
  modified_base 64: mod_base = OTHER; note = 2'-Omethylguanosine
  modified_base 65: mod_base = OTHER; note = 2'-Omethyluridine
  modified_base 66: mod_base = OTHER; note = 2'-Omethylguanosine
  modified_base 67: mod_base = OTHER; note = 2'-Omethylguanosine
  modified_base 72: mod_base = OTHER; note = 2'-Omethyluridine

SEQ ID NO: 9721 - RNA, 76 nt, synthetic construct; identical to SEQ ID NO: 625
  source 1..76: mol_type = other RNA
  modified_base 5: mod_base = OTHER; note = 2'-Omethylcytosine
  modified_base 6: mod_base = OTHER; note = 2'-fluorocytosine
  modified_base 7: mod_base = OTHER; note = Guanosine phosphorothiorate
  modified_base 8: mod_base = OTHER; note = Uridine phosphorothiorate
  modified_base 10: mod_base = OTHER; note = 2'-Omethylguanosine phosphorothiorate
  modified_base 11: mod_base = OTHER; note = 2'-Omethylcytosine phosphorothiorate
  modified_base 13: mod_base = OTHER; note = Cytosine phosphorothiorate
  modified_base 14: mod_base = OTHER; note = 2'-fluoroadenosine
  modified_base 19: mod_base = OTHER; note = Adenosine phosphorothiorate
  modified_base 20: mod_base = OTHER; note = 2'-Omethyluridine
  modified_base 21: mod_base = OTHER; note = Adenosine phosphorothiorate
  modified_base 22: mod_base = OTHER; note = 2'-fluoroguanosine
  modified_base 23: mod_base = OTHER; note = 2'-fluorocytosine
  modified_base 24: mod_base = OTHER; note = Guanosine phosphorothiorate
  modified_base 25: mod_base = OTHER; note = 2'-Omethylcytosine
  modified_base 29: mod_base = OTHER; note = Guanosine phosphorothiorate
  modified_base 30: mod_base = OTHER; note = 2'-fluoroguanosine phosphorothiorate
  modified_base 31: mod_base = OTHER; note = 2'-Omethyladenosine
  modified_base 40: mod_base = OTHER; note = 2'-Omethyluridine
  modified_base 41: mod_base = OTHER; note = 2'-fluorocytosine phosphorothiorate
  modified_base 42: mod_base = OTHER; note = 2'-fluoroadenosine
  modified_base 44: mod_base = OTHER; note = 2'-Omethyladenosine
  modified_base 47: mod_base = OTHER; note = 2'-Omethyluridine
  modified_base 48: mod_base = OTHER; note = 2'-Omethyluridine
  modified_base 51: mod_base = OTHER; note = 2'-Omethylguanosine phosphorothiorate
  modified_base 52: mod_base = OTHER; note = 2'-Omethylguanosine
  modified_base 53: mod_base = OTHER; note = 2'-Omethylguanosine
  modified_base 56: mod_base = OTHER; note = Cytosine phosphorothiorate
  modified_base 57: mod_base = OTHER; note = 2'-Omethylguanosine
  modified_base 59: mod_base = OTHER; note = Guanosine phosphorothiorate
  modified_base 60: mod_base = OTHER; note = 2'-Omethyluridine
  modified_base 62: mod_base = OTHER; note = 2'-fluorocytosine
  modified_base 63: mod_base = OTHER; note = 2'-Omethylcytosine
  modified_base 65: mod_base = OTHER; note = 2'-fluoroguanosine phosphorothiorate
  modified_base 69: mod_base = OTHER; note = Adenosine phosphorothiorate
  modified_base 70: mod_base = OTHER; note = Guanosine phosphorothiorate

SEQ ID NO: 9722 - DNA, 76 bp, synthetic construct; identical to SEQ ID NO: 1924
  source 1..76: mol_type = other DNA
  modified_base 1: mod_base = OTHER; note = 2'-Omethylguanosine phosphorothiorate
  modified_base 2: mod_base = OTHER; note = 2'-Omethylguanosine phosphorothiorate
  modified_base 19: mod_base = OTHER; note = Adenosine phosphorothiorate
  modified_base 29: mod_base = OTHER; note = 2'-O-(2-Methoxyethyl) guanosine
  modified_base 68: mod_base = OTHER; note = 2'-fluoroguanosine
  modified_base 72: mod_base = OTHER; note = 2'-fluorocytosine
  modified_base 73: mod_base = OTHER; note = Guanosine phosphorothiorate
  modified_base 74: mod_base = OTHER; note = Cytosine phosphorothiorate
  modified_base 75: mod_base = OTHER; note = 2'-Omethylcytosine
  misc_feature 1..19: note = RNA
  misc_feature 20: note = DNA
  misc_feature 21..43: note = RNA
  misc_feature 44: note = DNA
  misc_feature 45..76: note = RNA

SEQ ID NO: 9723 - RNA, 75 nt, synthetic construct; identical to SEQ ID NO: 1045
  source 1..75: mol_type = other RNA
  modified_base 1: mod_base = OTHER; note = 2'-Omethylguanosine
  modified_base 53: mod_base = OTHER; note = 2'-Omethyluridine
  modified_base 55: mod_base = OTHER; note = 2'-Omethylcytosine
  modified_base 56: mod_base = OTHER; note = 2'-fluoroguanosine
  modified_base 57: mod_base = OTHER; note = 2'-fluoroadenosine
  modified_base 58: mod_base = OTHER; note = 2'-Omethylguanosine
  modified_base 59: mod_base = OTHER; note = 2'-fluorouridine
  modified_base 72: mod_base = OTHER; note = 2'-Omethyluridine

SEQ ID NO: 9724 - RNA, 75 nt, synthetic construct; identical to SEQ ID NO: 1045
  source 1..75: mol_type = other RNA
  modified_base 1: mod_base = OTHER; note = 2'-Omethylguanosine phosphorothiorate
  modified_base 2: mod_base = OTHER; note = 2'-Omethylguanosine
  modified_base 3: mod_base = OTHER; note = 2'-Omethyluridine
  modified_base 44: mod_base = OTHER; note = Cytosine phosphorothiorate
  modified_base 49: mod_base = OTHER; note = 2'-Omethylcytosine
  modified_base 74: mod_base = OTHER; note = Cytosine phosphorothiorate
  modified_base 75: mod_base = OTHER; note = 2'-Omethyladenosine

SEQ ID NO: 9725 - DNA, 73 bp, synthetic construct; identical to SEQ ID NO: 3380
  source 1..73: mol_type = other DNA
  modified_base 1: mod_base = OTHER; note = 2'-Omethylguanosine phosphorothiorate
  modified_base 2: mod_base = OTHER; note = 2'-Omethylguanosine phosphorothiorate
  modified_base 45: mod_base = OTHER; note = Guanosine phosphorothiorate
  modified_base 65: mod_base = OTHER; note = 2'-Omethylguanosine
  modified_base 70: mod_base = OTHER; note = Guanosine phosphorothiorate
  modified_base 71: mod_base = OTHER; note = 2'-Omethyluridine phosphorothiorate
  modified_base 72: mod_base = OTHER; note = 2'-Omethylcytosine
  misc_feature 1..45: note = RNA
  misc_feature 46: note = DNA
  misc_feature 47..73: note = RNA

SEQ ID NO: 9726 - RNA, 76 nt, synthetic construct; identical to SEQ ID NO: 625
  source 1..76: mol_type = other RNA
  modified_base 1: mod_base = OTHER; note = 2'-Omethylguanosine phosphorothiorate
  modified_base 2: mod_base = OTHER; note = 2'-Omethylguanosine phosphorothiorate
  modified_base 65: mod_base = OTHER; note = Guanosine phosphorothiorate
  modified_base 66: mod_base = OTHER; note = 2'-O-(2-Methoxyethyl) 5-methylcytosine
  modified_base 74: mod_base = OTHER; note = Cytosine phosphorothiorate
  modified_base 75: mod_base = OTHER; note = 2'-Omethylcytosine

SEQ ID NO: 9727 - RNA, 76 nt, synthetic construct; identical to SEQ ID NO: 3295
  source 1..76: mol_type = other RNA
  modified_base 1: mod_base = OTHER; note = 2'-fluorocytosine phosphorothiorate
  modified_base 2: mod_base = OTHER; note = 2'-Omethylcytosine phosphorothiorate
  modified_base 3: mod_base = OTHER; note = Uridine phosphorothiorate
  modified_base 5: mod_base = OTHER; note = Cytosine phosphorothiorate
  modified_base 6: mod_base = OTHER; note = 2'-Omethylguanosine
  modified_base 8: mod_base = OTHER; note = 2'-fluorouridine phosphorothiorate
  modified_base 9: mod_base = OTHER; note = 2'-fluoroadenosine phosphorothiorate
  modified_base 12: mod_base = OTHER; note = 2'-Omethyluridine
  modified_base 17: mod_base = OTHER; note = 2'-Omethyluridine
  modified_base 18: mod_base = OTHER; note = 2'-fluoroguanosine phosphorothiorate
  modified_base 24: mod_base = OTHER; note = 2'-fluoroguanosine phosphorothiorate
  modified_base 27: mod_base = OTHER; note = 2'-Omethylguanosine phosphorothiorate
  modified_base 38: mod_base = OTHER; note = 2'-fluoroadenosine phosphorothiorate
  modified_base 41: mod_base = OTHER; note = Cytosine phosphorothiorate
  modified_base 46: mod_base = OTHER; note = 2'-Omethylguanosine
  modified_base 52: mod_base = OTHER; note = 2'-fluoroguanosine phosphorothiorate
  modified_base 53: mod_base = OTHER; note = 2'-Omethylguanosine phosphorothiorate
  modified_base 54: mod_base = OTHER; note = 2'-fluorouridine
  modified_base 59: mod_base = OTHER; note = Adenosine phosphorothiorate
  modified_base 74: mod_base = OTHER; note = Cytosine phosphorothiorate

SEQ ID NO: 9728 - RNA, 76 nt, synthetic construct; identical to SEQ ID NO: 625
  source 1..76: mol_type = other RNA
  modified_base 1: mod_base = OTHER; note = 2'-Omethylguanosine phosphorothiorate
  modified_base 2: mod_base = OTHER; note = 2'-Omethylguanosine
  modified_base 3: mod_base = OTHER; note = 2'-Omethylcytosine
  modified_base 4: mod_base = OTHER; note = 2'-Omethyluridine
  modified_base 5: mod_base = OTHER; note = 2'-Omethylcytosine
  modified_base 6: mod_base = OTHER; note = 2'-Omethylcytosine
  modified_base 10: mod_base = OTHER; note = 2'-Omethylguanosine
  modified_base 11: mod_base = OTHER; note = 2'-Omethylcytosine
  modified_base 12: mod_base = OTHER; note = 2'-Omethylguanosine
  modified_base 13: mod_base = OTHER; note = 2'-Omethylcytosine
  modified_base 14: mod_base = OTHER; note = 2'-Omethyladenosine
  modified_base 15: mod_base = OTHER; note = 2'-fluoroadenosine
  modified_base 16: mod_base = OTHER; note = 2'-Omethyluridine
  modified_base 17: mod_base = OTHER; note = 2'-Omethylguanosine
  modified_base 18: mod_base = OTHER; note = 2'-Omethylguanosine
  modified_base 19: mod_base = OTHER; note = 2'-fluoroadenosine
  modified_base 20: mod_base = OTHER; note = 2'-Omethyluridine
  modified_base 22: mod_base = OTHER; note = 2'-Omethylguanosine
  modified_base 23: mod_base = OTHER; note = 2'-Omethylcytosine
  modified_base 24: mod_base = OTHER; note = 2'-Omethylguanosine
  modified_base 25: mod_base = OTHER; note = 2'-Omethylcytosine
  modified_base 38: mod_base = OTHER; note = Adenosine phosphorothiorate
  modified_base 39: mod_base = OTHER; note = Uridine phosphorothiorate
  modified_base 40: mod_base = OTHER; note = 2'-fluorouridine
  modified_base 43: mod_base = OTHER; note = 2'-Omethyladenosine
  modified_base 44: mod_base = OTHER; note = 2'-Omethyladenosine
  modified_base 45: mod_base = OTHER; note = 2'-Omethylguanosine
  modified_base 46: mod_base = OTHER; note = 2'-fluoroguanosine
  modified_base 48: mod_base = OTHER; note = 2'-fluorouridine
  modified_base 49: mod_base = OTHER; note = 2'-Omethylcytosine
  modified_base 50: mod_base = OTHER; note = 2'-Omethylcytosine
  modified_base 54: mod_base = OTHER; note = Uridine phosphorothiorate
  modified_base 55: mod_base = OTHER; note = Uridine phosphorothiorate
  modified_base 56: mod_base = OTHER; note = 2'-Omethylcytosine
  modified_base 57: mod_base = OTHER; note = Guanosine phosphorothiorate
  modified_base 61: mod_base = OTHER; note = 2'-Omethylcytosine
  modified_base 62: mod_base = OTHER; note = 2'-Omethylcytosine
  modified_base 63: mod_base = OTHER; note = 2'-fluorocytosine
  modified_base 64: mod_base = OTHER; note = 2'-Omethylguanosine
  modified_base 65: mod_base = OTHER; note = 2'-Omethylguanosine
  modified_base 66: mod_base = OTHER; note = 2'-Omethylcytosine
  modified_base 67: mod_base = OTHER; note = 2'-Omethylguanosine
  modified_base 68: mod_base = OTHER; note = 2'-Omethylguanosine
  modified_base 69: mod_base = OTHER; note = 2'-Omethyladenosine

SEQ ID NO: 9729 - RNA, 76 nt, synthetic construct; identical to SEQ ID NO: 625
  source 1..76: mol_type = other RNA
  modified_base 1: mod_base = OTHER; note = 2'-Omethylguanosine phosphorothiorate
  modified_base 2: mod_base = OTHER; note = 2'-fluoroguanosine
  modified_base 4: mod_base = OTHER; note = 2'-fluorouridine
  modified_base 5: mod_base = OTHER; note = 2'-fluorocytosine
  modified_base 9: mod_base = OTHER; note = Guanosine phosphorothiorate
  modified_base 11: mod_base = OTHER; note = 2'-fluorocytosine
  modified_base 13: mod_base = OTHER; note = 2'-fluorocytosine
  modified_base 14: mod_base = OTHER; note = Adenosine phosphorothiorate
  modified_base 15: mod_base = OTHER; note = 2'-Omethyladenosine
  modified_base 17: mod_base = OTHER; note = Guanosine phosphorothiorate
  modified_base 20: mod_base = OTHER; note = Uridine phosphorothiorate
  modified_base 21: mod_base = OTHER; note = Adenosine phosphorothiorate
  modified_base 22: mod_base = OTHER; note = 2'-fluoroguanosine
  modified_base 23: mod_base = OTHER; note = 2'-fluorocytosine
  modified_base 26: mod_base = OTHER; note = 2'-Omethyladenosine phosphorothiorate
  modified_base 27: mod_base = OTHER; note = 2'-fluorouridine
  modified_base 32: mod_base = OTHER; note = 2'-fluorocytosine
  modified_base 34: mod_base = OTHER; note = 2'-fluorouridine
  modified_base 36: mod_base = OTHER; note = Adenosine phosphorothiorate
  modified_base 38: mod_base = OTHER; note = 2'-Omethyladenosine
  modified_base 42: mod_base = OTHER; note = 2'-fluoroadenosine
  modified_base 44: mod_base = OTHER; note = Adenosine phosphorothiorate
  modified_base 45: mod_base = OTHER; note = 2'-Omethylguanosine
  modified_base 46: mod_base = OTHER; note = 2'-Omethylguanosine
  modified_base 51: mod_base = OTHER; note = Guanosine phosphorothiorate
  modified_base 52: mod_base = OTHER; note = 2'-fluoroguanosine
  modified_base 57: mod_base = OTHER; note = Guanosine phosphorothiorate
  modified_base 58: mod_base = OTHER; note = Adenosine phosphorothiorate
  modified_base 60: mod_base = OTHER; note = Uridine phosphorothiorate
  modified_base 63: mod_base = OTHER; note = 2'-Omethylcytosine phosphorothiorate
  modified_base 64: mod_base = OTHER; note = 2'-fluoroguanosine
  modified_base 65: mod_base = OTHER; note = 2'-Omethylguanosine
  modified_base 66: mod_base = OTHER; note = 2'-Omethylcytosine phosphorothiorate

SEQ ID NO: 9730 - RNA, 75 nt, synthetic construct; identical to SEQ ID NO: 1045
  source 1..75: mol_type = other RNA
  modified_base 1: mod_base = OTHER; note = Guanosine phosphorothiorate
  modified_base 2: mod_base = OTHER; note = 2'-Omethylguanosine phosphorothiorate
  modified_base 15: mod_base = OTHER; note = 2'-fluoroadenosine
  modified_base 16: mod_base = OTHER; note = 2'-fluorouridine phosphorothiorate
  modified_base 17: mod_base = OTHER; note = Guanosine phosphorothiorate
  modified_base 27: mod_base = OTHER; note = Cytosine phosphorothiorate
  modified_base 28: mod_base = OTHER; note = 2'-fluorouridine
  modified_base 29: mod_base = OTHER; note = 2'-Omethylguanosine
  modified_base 39: mod_base = OTHER; note = Uridine phosphorothiorate
  modified_base 40: mod_base = OTHER; note = 2'-fluorocytosine
  modified_base 44: mod_base = OTHER; note = 2'-fluorocytosine phosphorothiorate
  modified_base 45: mod_base = OTHER; note = 2'-fluoroguanosine
  modified_base 51: mod_base = OTHER; note = 2'-fluoroadenosine phosphorothiorate
  modified_base 56: mod_base = OTHER; note = 2'-Omethylguanosine
  modified_base 60: mod_base = OTHER; note = 2'-fluorocytosine
  modified_base 64: mod_base = OTHER; note = 2'-fluoroguanosine
  modified_base 67: mod_base = OTHER; note = 2'-fluoroguanosine
  modified_base 71: mod_base = OTHER; note = 2'-fluorocytosine phosphorothiorate
  modified_base 74: mod_base = OTHER; note = Cytosine phosphorothiorate

SEQ ID NO: 9731 - RNA, 76 nt, synthetic construct; identical to SEQ ID NO: 3318
  source 1..76: mol_type = other RNA
  modified_base 1: mod_base = OTHER; note = 2'-Omethylcytosine
  modified_base 2: mod_base = OTHER; note = 2'-Omethylcytosine
  modified_base 3: mod_base = OTHER; note = 2'-Omethyluridine
  modified_base 4: mod_base = OTHER; note = 2'-Omethyluridine
  modified_base 5: mod_base = OTHER; note = 2'-Omethylcytosine
  modified_base 6: mod_base = OTHER; note = 2'-Omethylguanosine
  modified_base 13: mod_base = OTHER; note = 2'-Omethylcytosine
  modified_base 14: mod_base = OTHER; note = 2'-Omethyladenosine
  modified_base 15: mod_base = OTHER; note = 2'-Omethylguanosine
  modified_base 16: mod_base = OTHER; note = 2'-Omethyluridine
  modified_base 18: mod_base = OTHER; note = 2'-Omethylguanosine
  modified_base 19: mod_base = OTHER; note = 2'-Omethylguanosine
  modified_base 20: mod_base = OTHER; note = Uridine phosphorothiorate
  modified_base 21: mod_base = OTHER; note = Adenosine phosphorothiorate
  modified_base 25: mod_base = OTHER; note = 2'-Omethylcytosine
  modified_base 33: mod_base = OTHER; note = 2'-fluorouridine
  modified_base 34: mod_base = OTHER; note = 2'-Omethylcytosine
  modified_base 35: mod_base = OTHER; note = Uridine phosphorothiorate
  modified_base 37: mod_base = OTHER; note = Guanosine phosphorothiorate
  modified_base 38: mod_base = OTHER; note = Adenosine phosphorothiorate
  modified_base 41: mod_base = OTHER; note = 2'-fluorocytosine
  modified_base 42: mod_base = OTHER; note = 2'-Omethyluridine
  modified_base 43: mod_base = OTHER; note = 2'-Omethyluridine
  modified_base 44: mod_base = OTHER; note = 2'-fluoroadenosine
  modified_base 49: mod_base = OTHER; note = 2'-Omethylguanosine
  modified_base 50: mod_base = OTHER; note = 2'-Omethylcytosine
  modified_base 51: mod_base = OTHER; note = 2'-Omethyluridine
  modified_base 52: mod_base = OTHER; note = 2'-Omethylguanosine
  modified_base 53: mod_base = OTHER; note = 2'-Omethylguanosine
  modified_base 54: mod_base = OTHER; note = Uridine phosphorothiorate
  modified_base 55: mod_base = OTHER; note = Uridine phosphorothiorate
  modified_base 61: mod_base = OTHER; note = 2'-Omethylcytosine
  modified_base 65: mod_base = OTHER; note = 2'-Omethylcytosine
  modified_base 73: mod_base = OTHER; note = 2'-Omethyladenosine

SEQ ID NO: 9732 - RNA, 76 nt, synthetic construct; identical to SEQ ID NO: 625
  source 1..76: mol_type = other RNA
  modified_base 1: mod_base = OTHER; note = 2'-Omethylguanosine
  modified_base 2: mod_base = OTHER; note = 2'-Omethylguanosine
  modified_base 3: mod_base = OTHER; note = 2'-Omethylcytosine
  modified_base 4: mod_base = OTHER; note = 2'-Omethyluridine
  modified_base 5: mod_base = OTHER; note = 2'-Omethylcytosine
  modified_base 6: mod_base = OTHER; note = 2'-Omethylcytosine
  modified_base 13: mod_base = OTHER; note = 2'-Omethylcytosine
  modified_base 14: mod_base = OTHER; note = 2'-Omethyladenosine
  modified_base 15: mod_base = OTHER; note = 2'-fluoroadenosine
  modified_base 16: mod_base = OTHER; note = 2'-Omethyluridine
  modified_base 17: mod_base = OTHER; note = 2'-Omethylguanosine
  modified_base 18: mod_base = OTHER; note = 2'-Omethylguanosine
  modified_base 19: mod_base = OTHER; note = 2'-fluoroadenosine
  modified_base 20: mod_base = OTHER; note = 2'-Omethyluridine
  modified_base 21: mod_base = OTHER; note = 2'-fluoroadenosine
  modified_base 22: mod_base = OTHER; note = 2'-Omethylguanosine
  modified_base 23: mod_base = OTHER; note = 2'-Omethylcytosine
  modified_base 24: mod_base = OTHER; note = 2'-Omethylguanosine
  modified_base 25: mod_base = OTHER; note = 2'-fluorocytosine
  modified_base 29: mod_base = OTHER; note = 2'-Omethylguanosine
  modified_base 33: mod_base = OTHER; note = 2'-fluorouridine
  modified_base 35: mod_base = OTHER; note = Cytosine phosphorothiorate
  modified_base 37: mod_base = OTHER; note = Adenosine phosphorothiorate
  modified_base 38: mod_base = OTHER; note = Adenosine phosphorothiorate
  modified_base 41: mod_base = OTHER; note = 2'-fluorocytosine phosphorothiorate
  modified_base 43: mod_base = OTHER; note = 2'-Omethyladenosine
  modified_base 44: mod_base = OTHER; note = 2'-fluoroadenosine
  modified_base 45: mod_base = OTHER; note = 2'-fluoroguanosine
  modified_base 46: mod_base = OTHER; note = Guanosine phosphorothiorate
  modified_base 49: mod_base = OTHER; note = 2'-Omethylcytosine
  modified_base 50: mod_base = OTHER; note = 2'-Omethylcytosine
  modified_base 51: mod_base = OTHER; note = 2'-Omethylguanosine
  modified_base 52: mod_base = OTHER; note = 2'-Omethylguanosine
  modified_base 53: mod_base = OTHER; note = 2'-Omethylguanosine
  modified_base 54: mod_base = OTHER; note = Uridine phosphorothiorate
  modified_base 55: mod_base = OTHER; note = Uridine phosphorothiorate
  modified_base 56: mod_base = OTHER; note = 2'-Omethylcytosine
  modified_base 57: mod_base = OTHER; note = 2'-O-(2-Methoxyethyl) guanosine
  modified_base 59: mod_base = OTHER; note = 2'-Omethylguanosine
  modified_base 61: mod_base = OTHER; note = 2'-Omethylcytosine
  modified_base 62: mod_base = OTHER; note = 2'-Omethylcytosine
  modified_base 63: mod_base = OTHER; note = 2'-fluorocytosine
  modified_base 64: mod_base = OTHER; note = 2'-Omethylguanosine
  modified_base 65: mod_base = OTHER; note = 2'-Omethylguanosine
  modified_base 66: mod_base = OTHER; note = 2'-Omethylcytosine
  modified_base 67: mod_base = OTHER; note = 2'-Omethylguanosine
  modified_base 68: mod_base = OTHER; note = 2'-Omethylguanosine
  modified_base 69: mod_base = OTHER; note = 2'-fluoroadenosine
  modified_base 71: mod_base = OTHER; note = 2'-Omethyluridine
  modified_base 73: mod_base = OTHER; note = 2'-Omethylguanosine
  modified_base 74: mod_base = OTHER; note = Cytosine phosphorothiorate
  modified_base 75: mod_base = OTHER; note = 2'-Omethylcytosine

SEQ ID NO: 9733 - RNA, 85 nt, synthetic construct; identical to SEQ ID NO: 3297
  source 1..85: mol_type = other RNA
  modified_base 1: mod_base = OTHER; note = 2'-Omethylguanosine
  modified_base 59: mod_base = OTHER; note = 2'-Omethylcytosine
  modified_base 61: mod_base = OTHER; note = 2'-Omethylguanosine
  modified_base 82: mod_base = OTHER; note = 2'-Omethylguanosine

SEQ ID NO: 9734 - RNA, 76 nt, synthetic construct
  source 1..76: mol_type = other RNA
ggctccgtggcgcaatggatagcgcattggacttcaaattcaaaggttacgggttcgagtcccgtcggagccgcca

SEQ ID NO: 9735 - RNA, 85 nt, synthetic construct; identical to SEQ ID NO: 3286
  source 1..85: mol_type = other RNA
  modified_base 1: mod_base = OTHER; note = 2'-Omethylcytosine
  modified_base 11: mod_base = OTHER; note = Cytosine phosphorothiorate
  modified_base 37: mod_base = OTHER; note = 2'-fluoroadenosine
  modified_base 44: mod_base = OTHER; note = 2'-Omethylguanosine
  modified_base 50: mod_base = OTHER; note = Adenosine phosphorothiorate
  modified_base 54: mod_base = OTHER; note = 2'-fluorocytosine
  modified_base 72: mod_base = OTHER; note = 2'-fluorocytosine

SEQ ID NO: 9736 - RNA, 76 nt, synthetic construct; identical to SEQ ID NO: 625
  source 1..76: mol_type = other RNA
  modified_base 1: mod_base = OTHER; note = 2'-Omethylguanosine
  modified_base 2: mod_base = OTHER; note = 2'-Omethylguanosine
  modified_base 13: mod_base = OTHER; note = 2'-Omethylcytosine
  modified_base 17: mod_base = OTHER; note = Guanosine phosphorothiorate
  modified_base 18: mod_base = OTHER; note = 2'-Omethylguanosine
  modified_base 19: mod_base = OTHER; note = Adenosine phosphorothiorate
  modified_base 20: mod_base = OTHER; note = 2'-Omethyluridine
  modified_base 25: mod_base = OTHER; note = 2'-Omethylcytosine
  modified_base 29: mod_base = OTHER; note = 2'-Omethylguanosine
  modified_base 33: mod_base = OTHER; note = 2'-fluorouridine
  modified_base 35: mod_base = OTHER; note = Cytosine phosphorothiorate
  modified_base 37: mod_base = OTHER; note = Adenosine phosphorothiorate
  modified_base 38: mod_base = OTHER; note = Adenosine phosphorothiorate
  modified_base 41: mod_base = OTHER; note = 2'-fluorocytosine phosphorothiorate
  modified_base 43: mod_base = OTHER; note = 2'-Omethyladenosine
  modified_base 44: mod_base = OTHER; note = 2'-fluoroadenosine
  modified_base 46: mod_base = OTHER; note = Guanosine phosphorothiorate
  modified_base 50: mod_base = OTHER; note = 2'-Omethylcytosine
  modified_base 52: mod_base = OTHER; note = 2'-Omethylguanosine
  modified_base 54: mod_base = OTHER; note = Uridine phosphorothiorate
  modified_base 55: mod_base = OTHER; note = Uridine phosphorothiorate
  modified_base 56: mod_base = OTHER; note = 2'-Omethylcytosine
  modified_base 57: mod_base = OTHER; note = Guanosine phosphorothiorate
  modified_base 62: mod_base = OTHER; note = 2'-Omethylcytosine
  modified_base 63: mod_base = OTHER; note = 2'-fluorocytosine
  modified_base 65: mod_base = OTHER; note = 2'-Omethylguanosine
  modified_base 71: mod_base = OTHER; note = 2'-Omethyluridine
  modified_base 73: mod_base = OTHER; note = 2'-Omethylguanosine

SEQ ID NO: 9737 - RNA, 76 nt, synthetic construct; identical to SEQ ID NO: 625
  source 1..76: mol_type = other RNA
  modified_base 1: mod_base = OTHER; note = Guanosine phosphorothiorate
  modified_base 2: mod_base = OTHER; note = 2'-fluoroguanosine
  modified_base 3: mod_base = OTHER; note = 2'-fluorocytosine
  modified_base 4: mod_base = OTHER; note = 2'-fluorouridine
  modified_base 5: mod_base = OTHER; note = 2'-fluorocytosine
  modified_base 6: mod_base = OTHER; note = 2'-Omethylcytosine phosphorothiorate
  modified_base 13: mod_base = OTHER; note = 2'-fluorocytosine phosphorothiorate
  modified_base 14: mod_base = OTHER; note = 2'-Omethyladenosine phosphorothiorate
  modified_base 15: mod_base = OTHER; note = 2'-Omethyladenosine
  modified_base 16: mod_base = OTHER; note = Uridine phosphorothiorate
  modified_base 23: mod_base = OTHER; note = 2'-Omethylcytosine
  modified_base 27: mod_base = OTHER; note = 2'-Omethyluridine
  modified_base 28: mod_base = OTHER; note = 2'-fluorouridine
  modified_base 29: mod_base = OTHER; note = Guanosine phosphorothiorate
  modified_base 30: mod_base = OTHER; note = 2'-fluoroguanosine
  modified_base 31: mod_base = OTHER; note = 2'-fluoroadenosine
  modified_base 34: mod_base = OTHER; note = Uridine phosphorothiorate
  modified_base 38: mod_base = OTHER; note = 2'-Omethyladenosine
  modified_base 39: mod_base = OTHER; note = Uridine phosphorothiorate
  modified_base 41: mod_base = OTHER; note = 2'-fluorocytosine phosphorothiorate
  modified_base 42: mod_base = OTHER; note = Adenosine phosphorothiorate
  modified_base 43: mod_base = OTHER; note = 2'-fluoroadenosine
  modified_base 49: mod_base = OTHER; note = 2'-fluorocytosine
  modified_base 51: mod_base = OTHER; note = Guanosine phosphorothiorate
  modified_base 53: mod_base = OTHER; note = 2'-Omethylguanosine
  modified_base 54: mod_base = OTHER; note = 2'-Omethyluridine
  modified_base 58: mod_base = OTHER; note = 2'-fluoroadenosine
  modified_base 59: mod_base = OTHER; note = 2'-fluoroguanosine
  modified_base 64: mod_base = OTHER; note = 2'-Omethylguanosine phosphorothiorate
  modified_base 65: mod_base = OTHER; note = Guanosine phosphorothiorate
  modified_base 68: mod_base = OTHER; note = 2'-Omethylguanosine phosphorothiorate
  modified_base 69: mod_base = OTHER; note = 2'-Omethyladenosine
  modified_base 70: mod_base = OTHER; note = 2'-Omethylguanosine
  modified_base 71: mod_base = OTHER; note = Uridine phosphorothiorate
  modified_base 72: mod_base = OTHER; note = 2'-fluorocytosine

SEQ ID NO: 9738 - RNA, 85 nt, synthetic construct; identical to SEQ ID NO: 3297
  source 1..85: mol_type = other RNA
  modified_base 18: mod_base = OTHER; note = 2'-Omethylguanosine
  modified_base 39: mod_base = OTHER; note = 2'-Omethyluridine

SEQ ID NO: 9739 - RNA, 76 nt, synthetic construct; identical to SEQ ID NO: 3318
  source 1..76: mol_type = other RNA
  modified_base 1: mod_base = OTHER; note = 2'-Omethylcytosine
  modified_base 54: mod_base = OTHER; note = 2'-Omethyluridine phosphorothiorate
  modified_base 55: mod_base = OTHER; note = Uridine phosphorothiorate
  modified_base 56: mod_base = OTHER; note = 2'-Omethylcytosine
  modified_base 57: mod_base = OTHER; note = 2'-fluoroguanosine
  modified_base 58: mod_base = OTHER; note = 2'-fluoroadenosine phosphorothiorate
  modified_base 59: mod_base = OTHER; note = 2'-Omethyladenosine
  modified_base 60: mod_base = OTHER; note = 2'-fluorouridine
  modified_base 73: mod_base = OTHER; note = 2'-Omethyladenosine

SEQ ID NO: 9740 - RNA, 75 nt, synthetic construct; identical to SEQ ID NO: 1045
  source 1..75: mol_type = other RNA
  modified_base 1: mod_base = OTHER; note = 2'-Omethylguanosine phosphorothiorate
  modified_base 2: mod_base = OTHER; note = 2'-Omethylguanosine phosphorothiorate
  modified_base 6: mod_base = OTHER; note = 2'-Omethylcytosine
  modified_base 7: mod_base = OTHER; note = Adenosine phosphorothiorate
  modified_base 16: mod_base = OTHER; note = 2'-fluorouridine
  modified_base 19: mod_base = OTHER; note = 2'-fluorouridine
  modified_base 20: mod_base = OTHER; note = Adenosine phosphorothiorate
  modified_base 21: mod_base = OTHER; note = Adenosine phosphorothiorate
  modified_base 24: mod_base = OTHER; note = 2'-fluoroadenosine
  modified_base 34: mod_base = OTHER; note = 2'-fluorouridine
  modified_base 40: mod_base = OTHER; note = 2'-fluorocytosine
  modified_base 43: mod_base = OTHER; note = 2'-Omethylguanosine
  modified_base 47: mod_base = OTHER; note = 2'-fluorouridine
  modified_base 53: mod_base = OTHER; note = 2'-fluorouridine phosphorothiorate
  modified_base 56: mod_base = OTHER; note = 2'-Omethylguanosine
  modified_base 62: mod_base = OTHER; note = 2'-fluorocytosine
  modified_base 66: mod_base = OTHER; note = Guanosine phosphorothiorate
  modified_base 67: mod_base = OTHER; note = 2'-fluoroguanosine
  modified_base 68: mod_base = OTHER; note = Adenosine phosphorothiorate
  modified_base 74: mod_base = OTHER; note = 2'-fluorocytosine phosphorothiorate

SEQ ID NO: 9741 - RNA, 76 nt, synthetic construct; identical to SEQ ID NO: 3289
  source 1..76: mol_type = other RNA
  modified_base 1: mod_base = OTHER; note = 2'-Omethylguanosine phosphorothiorate
  modified_base 2: mod_base = OTHER; note = 2'-Omethylcytosine
  modified_base 3: mod_base = OTHER; note = 2'-Omethylcytosine
  modified_base 44: mod_base = OTHER; note = Guanosine phosphorothiorate
  modified_base 50: mod_base = OTHER; note = 2'-Omethyladenosine
  modified_base 75: mod_base = OTHER; note = Cytosine phosphorothiorate
  modified_base 76: mod_base = OTHER; note = 2'-Omethyladenosine

SEQ ID NO: 9742 - RNA, 85 nt, synthetic construct; identical to SEQ ID NO: 3288
  source 1..85: mol_type = other RNA
  modified_base 1: mod_base = OTHER; note = 2'-fluorocytosine phosphorothiorate
  modified_base 32: mod_base = OTHER; note = 2'-fluorouridine
  modified_base 36: mod_base = OTHER; note = Guanosine phosphorothiorate
  modified_base 46: mod_base = OTHER; note = 2'-Omethyladenosine
  modified_base 57: mod_base = OTHER; note = Cytosine phosphorothiorate
  modified_base 58: mod_base = OTHER; note = Guanosine phosphorothiorate
  modified_base 64: mod_base = OTHER; note = Uridine phosphorothiorate

SEQ ID NO: 9743 - RNA, 75 nt, synthetic construct; identical to SEQ ID NO: 3299
  source 1..75: mol_type = other RNA
  modified_base 14: mod_base = OTHER; note = 2'-fluoroguanosine
  modified_base 21: mod_base = OTHER; note = 2'-fluoroguanosine
  modified_base 27: mod_base = OTHER; note = Cytosine phosphorothiorate
  modified_base 38: mod_base = OTHER; note = 2'-fluorouridine
  modified_base 50: mod_base = OTHER; note = 2'-fluoroguanosine
  modified_base 56: mod_base = OTHER; note = 2'-fluoroadenosine phosphorothiorate
  modified_base 70: mod_base = OTHER; note = Guanosine phosphorothiorate
  modified_base 74: mod_base = OTHER; note = Cytosine phosphorothiorate

SEQ ID NO: 9744 - RNA, 75 nt, synthetic construct; identical to SEQ ID NO: 1045
  source 1..75: mol_type = other RNA
  modified_base 1: mod_base = OTHER; note = Guanosine phosphorothiorate
  modified_base 3: mod_base = OTHER; note = Uridine phosphorothiorate
  modified_base 9: mod_base = OTHER; note = 2'-fluoroguanosine
  modified_base 10: mod_base = OTHER; note = 2'-fluoroguanosine phosphorothiorate
  modified_base 11: mod_base = OTHER; note = Uridine phosphorothiorate
  modified_base 17: mod_base = OTHER; note = 2'-Omethylguanosine phosphorothiorate
  modified_base 20: mod_base = OTHER; note = Adenosine phosphorothiorate
  modified_base 21: mod_base = OTHER; note = 2'-fluoroadenosine
  modified_base 24: mod_base = OTHER; note = Adenosine phosphorothiorate
  modified_base 25: mod_base = OTHER; note = 2'-fluorocytosine
  modified_base 35: mod_base = OTHER; note = 2'-Omethyluridine
  modified_base 64: mod_base = OTHER; note = 2'-fluoroguanosine
  modified_base 72: mod_base = OTHER; note = Uridine phosphorothiorate
  modified_base 74: mod_base = OTHER; note = Cytosine phosphorothiorate

SEQ ID NO: 9745 - RNA, 85 nt, synthetic construct; identical to SEQ ID NO: 3286
  source 1..85: mol_type = other RNA
  modified_base 1: mod_base = OTHER; note = Cytosine phosphorothiorate
  modified_base 2: mod_base = OTHER; note = 2'-fluorocytosine phosphorothiorate
  modified_base 3: mod_base = OTHER; note = 2'-fluoroadenosine
  modified_base 22: mod_base = OTHER; note = 2'-fluoroguanosine
  modified_base 25: mod_base = OTHER; note = 2'-fluoroguanosine
  modified_base 27: mod_base = OTHER; note = 2'-fluorouridine
  modified_base 30: mod_base = OTHER; note = 2'-fluoroadenosine
  modified_base 33: mod_base = OTHER; note = 2'-fluorouridine phosphorothiorate
  modified_base 34: mod_base = OTHER; note = 2'-fluorouridine
  modified_base 39: mod_base = OTHER; note = Cytosine phosphorothiorate
  modified_base 43: mod_base = OTHER; note = 2'-Omethyluridine
  modified_base 45: mod_base = OTHER; note = Guanosine phosphorothiorate
  modified_base 49: mod_base = OTHER; note = Uridine phosphorothiorate
  modified_base 50: mod_base = OTHER; note = 2'-fluoroadenosine
  modified_base 54: mod_base = OTHER; note = 2'-Omethylcytosine
  modified_base 57: mod_base = OTHER; note = 2'-Omethylcytosine
  modified_base 58: mod_base = OTHER; note = 2'-Omethylguanosine
  modified_base 62: mod_base = OTHER; note = 2'-fluoroguanosine phosphorothiorate
  modified_base 71: mod_base = OTHER; note = 2'-fluorocytosine
  modified_base 76: mod_base = OTHER; note = Cytosine phosphorothiorate
  modified_base 84: mod_base = OTHER; note = 2'-fluorocytosine phosphorothiorate
  modified_base 85: mod_base = OTHER; note = 2'-Omethyladenosine

SEQ ID NO: 9746 - RNA, 76 nt, synthetic construct; identical to SEQ ID NO: 625
  source 1..76: mol_type = other RNA
  modified_base 4: mod_base = OTHER; note = 2'-Omethyluridine
  modified_base 13: mod_base = OTHER; note = 2'-Omethylcytosine
  modified_base 14: mod_base = OTHER; note = Adenosine phosphorothiorate
  modified_base 15: mod_base = OTHER; note = 2'-Omethyladenosine
  modified_base 16: mod_base = OTHER; note = Uridine phosphorothiorate
  modified_base 18: mod_base = OTHER; note = Guanosine phosphorothiorate
  modified_base 20: mod_base = OTHER; note = 2'-fluorouridine
  modified_base 22: mod_base = OTHER; note = 2'-Omethylguanosine
  modified_base 23: mod_base = OTHER; note = 2'-Omethylcytosine
  modified_base 27: mod_base = OTHER; note = 2'-Omethyluridine
  modified_base 30: mod_base = OTHER; note = Guanosine phosphorothiorate
  modified_base 31: mod_base = OTHER; note = 2'-fluoroadenosine
  modified_base 38: mod_base = OTHER; note = 2'-fluoroadenosine
  modified_base 40: mod_base = OTHER; note = 2'-fluorouridine
  modified_base 42: mod_base = OTHER; note = 2'-Omethyladenosine
  modified_base 43: mod_base = OTHER; note = 2'-fluoroadenosine phosphorothiorate
  modified_base 44: mod_base = OTHER; note = 2'-Omethyladenosine
  modified_base 45: mod_base = OTHER; note = Guanosine phosphorothiorate
  modified_base 46: mod_base = OTHER; note = Guanosine phosphorothiorate
  modified_base 52: mod_base = OTHER; note = 2'-fluoroguanosine phosphorothiorate
  modified_base 53: mod_base = OTHER; note = 2'-Omethylguanosine
  modified_base 61: mod_base = OTHER; note = 2'-Omethylcytosine
  modified_base 62: mod_base = OTHER; note = Cytosine phosphorothiorate
  modified_base 64: mod_base = OTHER; note = 2'-fluoroguanosine
  modified_base 66: mod_base = OTHER; note = 2'-fluorocytosine
  modified_base 68: mod_base = OTHER; note = 2'-Omethylguanosine
  modified_base 69: mod_base = OTHER; note = 2'-Omethyladenosine phosphorothiorate
  modified_base 70: mod_base = OTHER; note = 2'-Omethylguanosine
  modified_base 71: mod_base = OTHER; note = Uridine phosphorothiorate
  modified_base 72: mod_base = OTHER; note = 2'-fluorocytosine
  modified_base 73: mod_base = OTHER; note = 2'-Omethylguanosine
  modified_base 75: mod_base = OTHER; note = 2'-Omethylcytosine

SEQ ID NO: 9747 - RNA, 76 nt, synthetic construct; identical to SEQ ID NO: 625
  source 1..76: mol_type = other RNA
  modified_base 1: mod_base = OTHER; note = 2'-Omethylguanosine
  modified_base 17: mod_base = OTHER; note = 2'-Omethylguanosine
  modified_base 18: mod_base = OTHER; note = 2'-Omethylguanosine
  modified_base 50: mod_base = OTHER; note = 2'-Omethylcytosine
  modified_base 52: mod_base = OTHER; note = 2'-Omethylguanosine
  modified_base 55: mod_base = OTHER; note = Thymine
  modified_base 73: mod_base = OTHER; note = 2'-Omethylguanosine

SEQ ID NO: 9748 - RNA, 85 nt, synthetic construct; identical to SEQ ID NO: 3286
  source 1..85: mol_type = other RNA
  modified_base 1: mod_base = OTHER; note = 2'-Omethylcytosine
  modified_base 2: mod_base = OTHER; note = 2'-fluorocytosine
  modified_base 27: mod_base = OTHER; note = 2'-fluorouridine
  modified_base 51: mod_base = OTHER; note = 2'-Omethyluridine
  modified_base 56: mod_base = OTHER; note = 2'-fluoroguanosine
  modified_base 57: mod_base = OTHER; note = 2'-Omethylcytosine
  modified_base 73: mod_base = OTHER; note = Adenosine phosphorothiorate
  modified_base 84: mod_base = OTHER; note = 2'-fluorocytosine

SEQ ID NO: 9749 - RNA, 75 nt, synthetic construct; identical to SEQ ID NO: 1045
  source 1..75: mol_type = other RNA
  modified_base 1: mod_base = OTHER; note = 2'-Omethylguanosine phosphorothiorate
  modified_base 2: mod_base = OTHER; note = 2'-Omethylguanosine phosphorothiorate
  modified_base 73: mod_base = OTHER; note = Cytosine phosphorothiorate
  modified_base 74: mod_base = OTHER; note = 2'-Omethylcytosine

SEQ ID NO: 9750 - RNA, 76 nt, synthetic construct; identical to SEQ ID NO: 3295
  source 1..76: mol_type = other RNA
  modified_base 1: mod_base = OTHER; note = 2'-Omethylcytosine phosphorothiorate
  modified_base 2: mod_base = OTHER; note = 2'-fluorocytosine phosphorothiorate
  modified_base 5: mod_base = OTHER; note = 2'-fluorocytosine
  modified_base 8: mod_base = OTHER; note = 2'-fluorouridine phosphorothiorate
  modified_base 11: mod_base = OTHER; note = 2'-Omethylcytosine phosphorothiorate
  modified_base 16: mod_base = OTHER; note = 2'-fluorouridine phosphorothiorate
  modified_base 24: mod_base = OTHER; note = 2'-Omethylguanosine phosphorothiorate
  modified_base 29: mod_base = OTHER; note = Guanosine phosphorothiorate
  modified_base 30: mod_base = OTHER; note = 2'-fluoroguanosine
  modified_base 36: mod_base = OTHER; note = 2'-fluoroadenosine phosphorothiorate
  modified_base 42: mod_base = OTHER; note = 2'-fluorouridine phosphorothiorate
  modified_base 47: mod_base = OTHER; note = 2'-fluorouridine phosphorothiorate
  modified_base 49: mod_base = OTHER; note = 2'-Omethylguanosine
  modified_base 66: mod_base = OTHER; note = 2'-fluorouridine phosphorothiorate
  modified_base 72: mod_base = OTHER; note = Guanosine phosphorothiorate
  modified_base 75: mod_base = OTHER; note = Cytosine phosphorothiorate
  modified_base 76: mod_base = OTHER; note = 2'-Omethyladenosine

SEQ ID NO: 9751 - RNA, 76 nt, synthetic construct; identical to SEQ ID NO: 625
  source 1..76: mol_type = other RNA
  modified_base 1: mod_base = OTHER; note = 2'-Omethylguanosine phosphorothiorate
  modified_base 2: mod_base = OTHER; note = 2'-Omethylguanosine
  modified_base 17: mod_base = OTHER; note = 2'-Omethylguanosine
  modified_base 25: mod_base = OTHER; note = 2'-Omethylcytosine
  modified_base 33: mod_base = OTHER; note = 2'-fluorouridine
  modified_base 35: mod_base = OTHER; note = Cytosine phosphorothiorate
  modified_base 37: mod_base = OTHER; note = Adenosine phosphorothiorate
  modified_base 38: mod_base = OTHER; note = Adenosine phosphorothiorate
  modified_base 52: mod_base = OTHER; note = 2'-fluoroguanosine
  modified_base 56: mod_base = OTHER; note = 2'-Omethylcytosine
  modified_base 62: mod_base = OTHER; note = 2'-Omethylcytosine
  modified_base 73: mod_base = OTHER; note = 2'-Omethylguanosine
  modified_base 75: mod_base = OTHER; note = 2'-fluorocytosine phosphorothiorate
  modified_base 76: mod_base = OTHER; note = 2'-Omethyladenosine

SEQ ID NO: 9752 - RNA, 75 nt, synthetic construct; identical to SEQ ID NO: 1045
  source 1..75: mol_type = other RNA
  modified_base 1: mod_base = OTHER; note = 2'-Omethylguanosine phosphorothiorate
  modified_base 2: mod_base = OTHER; note = 2'-Omethylguanosine phosphorothiorate
  modified_base 3: mod_base = OTHER; note = 2'-Omethyluridine
  modified_base 4: mod_base = OTHER; note = 2'-Omethyluridine
  modified_base 5: mod_base = OTHER; note = 2'-Omethylcytosine
  modified_base 6: mod_base = OTHER; note = 2'-Omethylcytosine
  modified_base 44: mod_base = OTHER; note = 2'-Omethylcytosine
  modified_base 45: mod_base = OTHER; note = 2'-Omethylguanosine
  modified_base 48: mod_base = OTHER; note = 2'-Omethylcytosine
  modified_base 49: mod_base = OTHER; note = 2'-Omethylcytosine
  modified_base 50: mod_base = OTHER; note = 2'-Omethylguanosine
  modified_base 51: mod_base = OTHER; note = 2'-Omethyladenosine
  modified_base 52: mod_base = OTHER; note = 2'-Omethylguanosine
  modified_base 53: mod_base = OTHER; note = 2'-Omethyluridine
  modified_base 60: mod_base = OTHER; note = 2'-Omethylcytosine
  modified_base 61: mod_base = OTHER; note = 2'-Omethyluridine
  modified_base 62: mod_base = OTHER; note = 2'-fluorocytosine
  modified_base 63: mod_base = OTHER; note = 2'-Omethylguanosine
  modified_base 64: mod_base = OTHER; note = 2'-Omethylguanosine
  modified_base 65: mod_base = OTHER; note = 2'-Omethyluridine
  modified_base 66: mod_base = OTHER; note = 2'-Omethylguanosine
  modified_base 67: mod_base = OTHER; note = 2'-Omethylguanosine
  modified_base 72: mod_base = OTHER; note = 2'-Omethyluridine

SEQ ID NO: 9753 - RNA, 76 nt, synthetic construct; identical to SEQ ID NO: 625
  source 1..76: mol_type = other RNA
  modified_base 1: mod_base = OTHER; note = 2'-Omethylguanosine phosphorothiorate
  modified_base 2: mod_base = OTHER; note = 2'-Omethylguanosine
  modified_base 13: mod_base = OTHER; note = 2'-Omethylcytosine
  modified_base 33: mod_base = OTHER; note = 2'-fluorouridine
  modified_base 37: mod_base = OTHER; note = Adenosine phosphorothiorate
  modified_base 52: mod_base = OTHER; note = 2'-Omethylguanosine
  modified_base 55: mod_base = OTHER; note = Uridine phosphorothiorate
  modified_base 63: mod_base = OTHER; note = 2'-fluorocytosine
  modified_base 73: mod_base = OTHER; note = 2'-Omethylguanosine
  modified_base 75: mod_base = OTHER; note = 2'-fluorocytosine phosphorothiorate

SEQ ID NO: 9754 - RNA, 86 nt, synthetic construct; identical to SEQ ID NO: 3290
  source 1..86: mol_type = other RNA
  modified_base 1: mod_base = OTHER; note = 2'-Omethyladenosine
  modified_base 2: mod_base = OTHER; note = 2'-Omethylcytosine
  modified_base 3: mod_base = OTHER; note = 2'-Omethylcytosine
  modified_base 4: mod_base = OTHER; note = 2'-Omethyladenosine
  modified_base 5: mod_base = OTHER; note = 2'-Omethylguanosine
  modified_base 6: mod_base = OTHER; note = 2'-Omethylguanosine
  modified_base 10: mod_base = OTHER; note = 2'-Omethylguanosine
  modified_base 11: mod_base = OTHER; note = 2'-Omethylcytosine
  modified_base 12: mod_base = OTHER; note = 2'-Omethylcytosine
  modified_base 13: mod_base = OTHER; note = 2'-Omethylguanosine
  modified_base 22: mod_base = OTHER; note = 2'-Omethyladenosine
  modified_base 23: mod_base = OTHER; note = 2'-Omethylguanosine
  modified_base 24: mod_base = OTHER; note = 2'-Omethylguanosine
  modified_base 25: mod_base = OTHER; note = 2'-Omethylcytosine
  modified_base 59: mod_base = OTHER; note = 2'-Omethylguanosine
  modified_base 60: mod_base = OTHER; note = 2'-Omethyluridine
  modified_base 61: mod_base = OTHER; note = 2'-Omethylguanosine
  modified_base 62: mod_base = OTHER; note = 2'-Omethylguanosine
  modified_base 63: mod_base = OTHER; note = 2'-Omethylguanosine

SEQ ID NO: 9755 - RNA, 75 nt, synthetic construct; identical to SEQ ID NO: 3311
  source 1..75: mol_type = other RNA
  modified_base 1: mod_base = OTHER; note = Guanosine phosphorothiorate
  modified_base 2: mod_base = OTHER; note = 2'-Omethylguanosine phosphorothiorate
  modified_base 19: mod_base = OTHER; note = 2'-Omethyluridine phosphorothiorate
  modified_base 20: mod_base = OTHER; note = 2'-fluoroadenosine
  modified_base 22: mod_base = OTHER; note = 2'-fluoroguanosine
  modified_base 23: mod_base = OTHER; note = Cytosine phosphorothiorate
  modified_base 36: mod_base = OTHER; note = 2'-fluoroadenosine
  modified_base 42: mod_base = OTHER; note = Adenosine phosphorothiorate
  modified_base 44: mod_base = OTHER; note = 2'-fluorocytosine
  modified_base 63: mod_base = OTHER; note = Guanosine phosphorothiorate
  modified_base 73: mod_base = OTHER; note = Cytosine phosphorothiorate
  modified_base 74: mod_base = OTHER; note = 2'-Omethylcytosine

SEQ ID NO: 9756 - RNA, 86 nt, synthetic construct; identical to SEQ ID NO: 3290
  source 1..86: mol_type = other RNA
  modified_base 1: mod_base = OTHER; note = 2'-Omethyladenosine
  modified_base 2: mod_base = OTHER; note = 2'-Omethylcytosine
  modified_base 3: mod_base = OTHER; note = 2'-Omethylcytosine
  modified_base 4: mod_base = OTHER; note = 2'-Omethyladenosine
  modified_base 5: mod_base = OTHER; note = 2'-Omethylguanosine
  modified_base 6: mod_base = OTHER; note = 2'-Omethylguanosine
  modified_base 14: mod_base = OTHER; note = 2'-Omethyladenosine
  modified_base 15: mod_base = OTHER; note = 2'-Omethylguanosine
  modified_base 16: mod_base = OTHER; note = 2'-Omethyluridine
  modified_base 17: mod_base = OTHER; note = 2'-Omethylguanosine
  modified_base 18: mod_base = OTHER; note = 2'-Omethylguanosine
  modified_base 20: mod_base = OTHER; note = 2'-Omethyluridine
  modified_base 25: mod_base = OTHER; note = 2'-Omethylcytosine
  modified_base 41: mod_base = OTHER; note = 2'-Omethylcytosine
  modified_base 42: mod_base = OTHER; note = 2'-Omethyladenosine
  modified_base 43: mod_base = OTHER; note = 2'-Omethyladenosine
  modified_base 44: mod_base = OTHER; note = 2'-Omethyluridine
  modified_base 59: mod_base = OTHER; note = 2'-Omethylguanosine
  modified_base 60: mod_base = OTHER; note = 2'-Omethyluridine
  modified_base 62: mod_base = OTHER; note = 2'-Omethylguanosine
  modified_base 64: mod_base = OTHER; note = 2'-Omethyluridine
  modified_base 65: mod_base = OTHER; note = Uridine phosphorothiorate
  modified_base 66: mod_base = OTHER; note = 2'-Omethylcytosine
  modified_base 67: mod_base = OTHER; note = 2'-fluoroguanosine
  modified_base 69: mod_base = OTHER; note = 2'-Omethyladenosine
  modified_base 71: mod_base = OTHER; note = 2'-Omethylcytosine
  modified_base 75: mod_base = OTHER; note = 2'-Omethylcytosine
  modified_base 83: mod_base = OTHER; note = 2'-Omethyladenosine

SEQ ID NO: 9757 - RNA, 76 nt, synthetic construct; identical to SEQ ID NO: 3325
  source 1..76: mol_type = other RNA
  modified_base 1: mod_base = OTHER; note = 2'-Omethyluridine
  modified_base 61: mod_base = OTHER; note = 2'-Omethylcytosine
  modified_base 62: mod_base = OTHER; note = 2'-Omethylcytosine
  modified_base 64: mod_base = OTHER; note = 2'-Omethylguanosine
  modified_base 65: mod_base = OTHER; note = 2'-Omethylguanosine
  modified_base 66: mod_base = OTHER; note = 2'-Omethylcytosine
  modified_base 67: mod_base = OTHER; note = 2'-Omethylguanosine
  modified_base 68: mod_base = OTHER; note = 2'-Omethylguanosine
  modified_base 69: mod_base = OTHER; note = 2'-Omethyluridine
  modified_base 70: mod_base = OTHER; note = 2'-fluoroguanosine
  modified_base 71: mod_base = OTHER; note = 2'-Omethyluridine
  modified_base 72: mod_base = OTHER; note = 2'-Omethyladenosine
  modified_base 73: mod_base = OTHER; note = 2'-Omethylguanosine

SEQ ID NO: 9758 - RNA, 72 nt, synthetic construct
  source 1..72: mol_type = other RNA
ggctcgttggtctaggggtatgattctcgcttagggtgcgagaggtcccgggttcaaatcccggacgagccc

SEQ ID NO: 9759 - RNA, 72 nt, synthetic construct
  source 1..72: mol_type = other RNA
ggggatgtagctcagtggtagagcgcatgctttgcatgtatgaggtcccgggttcgatccccggcatctcca

SEQ ID NO: 9760 - RNA, 76 nt, synthetic construct; identical to SEQ ID NO: 625
  source 1..76: mol_type = other RNA

SEQ ID NO: 9761 - DNA, 73 bp, synthetic construct; identical to SEQ ID NO: 167
  source 1..73: mol_type = other DNA

SEQ ID NO: 9762 - DNA, 73 bp, synthetic construct
  source 1..73: mol_type = other DNA
  misc_difference 17: note = a, c, t, or g, unknown, or other
gccctcttagcgcagtnggcagcgcgtcagtctcataatctgaaggtcctgagttcgagcctcagagagggca

SEQ ID NO: 9763 - DNA, 74 bp, synthetic construct
  source 1..74: mol_type = other DNA
  misc_difference 41: note = a, c, t, or g, unknown, or other
gccgaaatagctcagttgggagagcgttagactgaagatcntaaaggtccctggttcaatcccgggtttcggca

SEQ ID NO: 9764 - DNA, 72 bp, synthetic construct; identical to SEQ ID NO: 183
  source 1..72: mol_type = other DNA

SEQ ID NO: 9765 - DNA, 72 bp, synthetic construct; identical to SEQ ID NO: 185
  source 1..72: mol_type = other DNA

SEQ ID NO: 9766 - DNA, 72 bp, synthetic construct; identical to SEQ ID NO: 189
  source 1..72: mol_type = other DNA

SEQ ID NO: 9767 - DNA, 82 bp, synthetic construct; identical to SEQ ID NO: 192
  source 1..82: mol_type = other DNA

SEQ ID NO: 9768 - DNA, 82 bp, synthetic construct; identical to SEQ ID NO: 196
  source 1..82: mol_type = other DNA

SEQ ID NO: 9769 - DNA, 84 bp, synthetic construct
  source 1..84: mol_type = other DNA
  misc_difference 8: note = a, c, t, or g, unknown, or other
  misc_difference 9: note = a, c, t, or g, unknown, or other
gacgaggnntggccgagtggttaaggcgatggactgctaatccattgtgctctgcacgcgtgggttcgaatcccatcctcgtcg

SEQ ID NO: 9770 - DNA, 82 bp, synthetic construct
  source 1..82: mol_type = other DNA
gtagtcgtggccgagtggttaaggcgatggacttgaaatccattggggtctccccgcgcaggttcgaatcctgccggctacg

SEQ ID NO: 9771 - DNA, 74 bp, synthetic construct; identical to SEQ ID NO: 211
  source 1..74: mol_type = other DNA

SEQ ID NO: 9772 - DNA, 75 bp, synthetic construct
  source 1..75: mol_type = other DNA
  misc_difference 4: note = a, c, t, or g, unknown, or other
  misc_difference 13: note = a, c, t, or g, unknown, or other
  misc_difference 17: note = a, c, t, or g, unknown, or other
  misc_difference 20: note = a, c, t, or g, unknown, or other
  misc_difference 43: note = a, c, t, or g, unknown, or other
  misc_difference 51: note = a, c, t, or g, unknown, or other
  misc_difference 67: note = a, c, t, or g, unknown, or other
  misc_difference 69: note = a, c, t, or g, unknown, or other
ggcnctgtggctnagtnggntaaagcgccggtctcgtaaaccnggagatcntgggttcgaatcccancngggcct

SEQ ID NO: 9773 - DNA, 74 bp, synthetic construct
  source 1..74: mol_type = other DNA
  misc_difference 16: note = a, c, t, or g, unknown, or other
ggctccatagctcagngggttagagcactggtcttgtaaaccaggggtcgcgagttcaaatctcgctggggcct

SEQ ID NO: 9774 - DNA, 73 bp, synthetic construct
  source 1..73: mol_type = other DNA
ccttcgatagctcagctggtagagcggaggactgtagatccttaggtcgctggttcgattccggctcgaagga

SEQ ID NO: 9775 - DNA, 73 bp, synthetic construct; identical to SEQ ID NO: 246
  source 1..73: mol_type = other DNA

SEQ ID NO: 9776 - DNA, 73 bp, synthetic construct; identical to SEQ ID NO: 252
  source 1..73: mol_type = other DNA

SEQ ID NO: 9777 - DNA, 73 bp, synthetic construct; identical to SEQ ID NO: 258
  source 1..73: mol_type = other DNA

SEQ ID NO: 9778 - DNA, 72 bp, synthetic construct; identical to SEQ ID NO: 262
  source 1..72: mol_type = other DNA

SEQ ID NO: 9779 - DNA, 76 bp, synthetic construct
  source 1..76: mol_type = other DNA
  misc_difference 74: note = a, c, t, or g, unknown, or other
  misc_difference 75: note = a, c, t, or g, unknown, or other
  misc_difference 76: note = a, c, t, or g, unknown, or other
ggggaattagctcaagtggtagagcgcttgcttagcatgcaagaggtagtgggatcgatgcccacattctccannn

SEQ ID NO: 9780 - DNA, 75 bp, synthetic construct
  source 1..75: mol_type = other DNA
  misc_difference 73: note = a, c, t, or g, unknown, or other
  misc_difference 74: note = a, c, t, or g, unknown, or other
  misc_difference 75: note = a, c, t, or g, unknown, or other
ggggatgtagctcagtggtagagcgcatgcttcgcatgtatgaggtcccgggttcgatccccggcatctccannn

SEQ ID NO: 9781 - DNA, 75 bp, synthetic construct
  source 1..75: mol_type = other DNA
  misc_difference 73: note = a, c, t, or g, unknown, or other
  misc_difference 74: note = a, c, t, or g, unknown, or other
  misc_difference 75: note = a, c, t, or g, unknown, or other
gggggtgtagctcagtggtagagcgcatgctttgcatgtatgaggccccgggttcgatccccggcacctccannn

SEQ ID NO: 9782 - DNA, 76 bp, synthetic construct
  source 1..76: mol_type = other DNA
  misc_difference 74: note = a, c, t, or g, unknown, or other
  misc_difference 75: note = a, c, t, or g, unknown, or other
  misc_difference 76: note = a, c, t, or g, unknown, or other
gggccagtggcgcaatggataacgcgtctgactacggatcagaagattccaggttcgactcctggctggctcgnnn

SEQ ID NO: 9783 - DNA, 76 bp, synthetic construct
  source 1..76: mol_type = other DNA
  misc_difference 74: note = a, c, t, or g, unknown, or other
  misc_difference 75: note = a, c, t, or g, unknown, or other
  misc_difference 76: note = a, c, t, or g, unknown, or other
ggccgcgtggcctaatggataaggcgtctgattccggatcagaagattgagggttcgagtcccttcgtggtcgnnn

SEQ ID NO: 9784 - DNA, 76 bp, synthetic construct
  source 1..76: mol_type = other DNA
  misc_difference 74: note = a, c, t, or g, unknown, or other
  misc_difference 75: note = a, c, t, or g, unknown, or other
  misc_difference 76: note = a, c, t, or g, unknown, or other
gccccagtggcctaatggataaggcactggcctcctaagccagggattgtgggttcgagtcccacctggggtannn

SEQ ID NO: 9785 - DNA, 76 bp, synthetic construct
  source 1..76: mol_type = other DNA
  misc_difference 74: note = a, c, t, or g, unknown, or other
  misc_difference 75: note = a, c, t, or g, unknown, or other
  misc_difference 76: note = a, c, t, or g, unknown, or other
gaccgcgtggcctaatggataaggcgtctgacttcggatcagaagattgagggttcgagtccctccgtggtcgnnn

SEQ ID NO: 9786 - DNA, 77 bp, synthetic construct
  source 1..77: mol_type = other DNA
  misc_difference 21: note = a, c, t, or g, unknown, or other
  misc_difference 65: note = a, c, t, or g, unknown, or other
  misc_difference 75: note = a, c, t, or g, unknown, or other
  misc_difference 76: note = a, c, t, or g, unknown, or other
  misc_difference 77: note = a, c, t, or g, unknown, or other
ggctctgtggcgcaatggatnagcgcattggacttctaattcaaaggttgcgggttcgagtcccnccagagtcgnnn

SEQ ID NO: 9787 - DNA, 78 bp, synthetic construct
  source 1..78: mol_type = other DNA
  misc_difference 43: note = a, c, t, or g, unknown, or other
  misc_difference 76: note = a, c, t, or g, unknown, or other
  misc_difference 77: note = a, c, t, or g, unknown, or other
  misc_difference 78: note = a, c, t, or g, unknown, or other
gtctctgtggcgcaatcggttagcgcgttcggctgttaaccgnaaaggttggtggttcgagcccacccagggacgnnn

SEQ ID NO: 9788 - DNA, 76 bp, synthetic construct
  source 1..76: mol_type = other DNA
  misc_difference 16: note = a, c, t, or g, unknown, or other
  misc_difference 74: note = a, c, t, or g, unknown, or other
  misc_difference 75: note = a, c, t, or g, unknown, or other
  misc_difference 76: note = a, c, t, or g, unknown, or other
gggggtatagctcagngggtagagcatttgactgcagatcaagaggtccccggttcaaatccgggtgccccctnnn

SEQ ID NO: 9789 - DNA, 75 bp, synthetic construct
  source 1..75: mol_type = other DNA
  misc_difference 20: note = a, c, t, or g, unknown, or other
  misc_difference 73: note = a, c, t, or g, unknown, or other
  misc_difference 74: note = a, c, t, or g, unknown, or other
  misc_difference 75: note = a, c, t, or g, unknown, or other
ggttccatggtgtaatggtnagcactctggactctgaatccagcgatccgagttcaagtctcggtggaacctnnn

SEQ ID NO: 9790 - DNA, 75 bp, synthetic construct
  source 1..75: mol_type = other DNA
  misc_difference 73: note = a, c, t, or g, unknown, or other
  misc_difference 74: note = a, c, t, or g, unknown, or other
  misc_difference 75: note = a, c, t, or g, unknown, or other
ggtcccatggtgtaatggttagcactctggactttgaatccagcgatccgagttcaaatctcggtgggacctnnn

SEQ ID NO: 9791 - DNA, 75 bp, synthetic construct
  source 1..75: mol_type = other DNA
  misc_difference 73: note = a, c, t, or g, unknown, or other
  misc_difference 74: note = a, c, t, or g, unknown, or other
  misc_difference 75: note = a, c, t, or g, unknown, or other
tccctggtggtctagtggttaggattcggcgctctcaccgccgcggcccgggttcgattcccggtcagggaannn

SEQ ID NO: 9792 - DNA, 75 bp, synthetic construct
  source 1..75: mol_type = other DNA
  misc_difference 42: note = a, c, t, or g, unknown, or other
  misc_difference 73: note = a, c, t, or g, unknown, or other
  misc_difference 74: note = a, c, t, or g, unknown, or other
  misc_difference 75: note = a, c, t, or g, unknown, or other
tccctggtggtctagtggctaggattcggcgctttcaccgcngcggcccgggttcgattcccggtcagggaannn

SEQ ID NO: 9793 - DNA, 74 bp, synthetic construct
  source 1..74: mol_type = other DNA
  misc_difference 40: note = a, c, t, or g, unknown, or other
  misc_difference 72: note = a, c, t, or g, unknown, or other
  misc_difference 73: note = a, c, t, or g, unknown, or other
  misc_difference 74: note = a, c, t, or g, unknown, or other
gcattggtggttcagtggtagaattctcgcctcccacgcnggagacccgggttcgattcccggccaatgcannn

SEQ ID NO: 9794 - DNA, 74 bp, synthetic construct
  source 1..74: mol_type = other DNA
  misc_difference 72: note = a, c, t, or g, unknown, or other
  misc_difference 73: note = a, c, t, or g, unknown, or other
  misc_difference 74: note = a, c, t, or g, unknown, or other
gcattggtggttcagtggtagaattctcgcctgccacgcgggaggcccgggttcgattcccggccaatgcannn

SEQ ID NO: 9795 - DNA, 75 bp, synthetic construct
  source 1..75: mol_type = other DNA
  misc_difference 73: note = a, c, t, or g, unknown, or other
  misc_difference 74: note = a, c, t, or g, unknown, or other
  misc_difference 75: note = a, c, t, or g, unknown, or other
gcgttggtggtatagtggtgagcatagctgccttccaagcagttgacccgggttcgattcccggccaacgcannn

SEQ ID NO: 9796 - DNA, 77 bp, synthetic construct
  source 1..77: mol_type = other DNA
  misc_difference 75: note = a, c, t, or g, unknown, or other
  misc_difference 76: note = a, c, t, or g, unknown, or other
  misc_difference 77: note = a, c, t, or g, unknown, or other
ggccggttagctcagttggttagagcgtggtgctaataacgccaaggtcgcgggttcgatccccgtacgggccannn

SEQ ID NO: 9797 - DNA, 77 bp, synthetic construct
  source 1..77: mol_type = other DNA
  misc_difference 75: note = a, c, t, or g, unknown, or other
  misc_difference 76: note = a, c, t, or g, unknown, or other
  misc_difference 77: note = a, c, t, or g, unknown, or other
gctccagtggcgcaatcggttagcgcgcggtacttataatgccgaggttgtgagttcgagcctcacctggagcannn

SEQ ID NO: 9798 - DNA, 85 bp, synthetic construct
  source 1..85: mol_type = other DNA
  misc_difference 83: note = a, c, t, or g, unknown, or other
  misc_difference 84: note = a, c, t, or g, unknown, or other
  misc_difference 85: note = a, c, t, or g, unknown, or other
ggtagcgtggccgagcggtctaaggcgctggattaaggctccagtctcttcgggggcgtgggttcgaatcccaccgctgccannn

SEQ ID NO: 9799 - DNA, 88 bp, synthetic construct
  source 1..88: mol_type = other DNA
  misc_difference 21: note = a, c, t, or g, unknown, or other
  misc_difference 52: note = a, c, t, or g, unknown, or other
  misc_difference 86: note = a, c, t, or g, unknown, or other
  misc_difference 87: note = a, c, t, or g, unknown, or other
  misc_difference 88: note = a, c, t, or g, unknown, or other
gtcaggatggccgagtggtcntaaggcgccagactcaagttctggtctccgnatggaggcgtgggttcgaatcccacttctgacannn

SEQ ID NO: 9800 - DNA, 86 bp, synthetic construct
  source 1..86: mol_type = other DNA
  misc_difference 84: note = a, c, t, or g, unknown, or other
  misc_difference 85: note = a, c, t, or g, unknown, or other
  misc_difference 86: note = a, c, t, or g, unknown, or other
gtcaggatggccgagcggtctaaggcgctgcgttcaggtcgcagtctcccctggaggcgtgggttcgaatcccactcctgacannn

SEQ ID NO: 9801 - DNA, 86 bp, synthetic construct
  source 1..86: mol_type = other DNA
  misc_difference 84: note = a, c, t, or g, unknown, or other
  misc_difference 85: note = a, c, t, or g, unknown, or other
  misc_difference 86: note = a, c, t, or g, unknown, or other
accaggatggccgagtggttaaggcgttggacttaagatccaatggacagatgtccgcgtgggttcgaaccccactcctggtannn

SEQ ID NO: 9802 - DNA, 85 bp, synthetic construct
  source 1..85: mol_type = other DNA
  misc_difference 54: note = a, c, t, or g, unknown, or other
  misc_difference 83: note = a, c, t, or g, unknown, or other
  misc_difference 84: note = a, c, t, or g, unknown, or other
  misc_difference 85: note = a, c, t, or g, unknown, or other
ggtagcgtggccgagcggtctaaggcgctggatttaggctccagtctcttcggnggcgtgggttcgaatcccaccgctgccannn

SEQ ID NO: 9803 - DNA, 79 bp, synthetic construct
  source 1..79: mol_type = other DNA
  misc_difference 74: note = a, c, t, or g, unknown, or other
  misc_difference 75: note = a, c, t, or g, unknown, or other
  misc_difference 76: note = a, c, t, or g, unknown, or other
  misc_difference 77: note = a, c, t, or g, unknown, or other
  misc_difference 78: note = a, c, t, or g, unknown, or other
  misc_difference 79: note = a, c, t, or g, unknown, or other
gcccggctagctcagtcggtagagcatgagactcttaatctcagggtcgtgggttcgagccccacgttgggcgnnnnnn

SEQ ID NO: 9804 - DNA, 76 bp, synthetic construct
  source 1..76: mol_type = other DNA
  misc_difference 74: note = a, c, t, or g, unknown, or other
  misc_difference 75: note = a, c, t, or g, unknown, or other
  misc_difference 76: note = a, c, t, or g, unknown, or other
gcctggatagctcagtcggtagagcatcagacttttaatctgagggtccagggttcaagtccctgttcaggcgnnn

SEQ ID NO: 9805 - DNA, 76 bp, synthetic construct
  source 1..76: mol_type = other DNA
  misc_difference 17: note = a, c, t, or g, unknown, or other
  misc_difference 74: note = a, c, t, or g, unknown, or other
  misc_difference 75: note = a, c, t, or g, unknown, or other
  misc_difference 76: note = a, c, t, or g, unknown, or other
gccctcttagcgcagtnggcagcgcgtcagtctcataatctgaaggtcctgagttcgagcctcagagagggcannn

SEQ ID NO: 9806 - DNA, 77 bp, synthetic construct
  source 1..77: mol_type = other DNA
  misc_difference 41: note = a, c, t, or g, unknown, or other
  misc_difference 75: note = a, c, t, or g, unknown, or other
  misc_difference 76: note = a, c, t, or g, unknown, or other
  misc_difference 77: note = a, c, t, or g, unknown, or other
gccgaaatagctcagttgggagagcgttagactgaagatcntaaaggtccctggttcaatcccgggtttcggcannn

SEQ ID NO: 9807 - DNA, 75 bp, synthetic construct
  source 1..75: mol_type = other DNA
  misc_difference 73: note = a, c, t, or g, unknown, or other
  misc_difference 74: note = a, c, t, or g, unknown, or other
  misc_difference 75: note = a, c, t, or g, unknown, or other
ggctcgttggtctaggggtatgattctcgcttaggatgcgagaggtcccgggttcaaatcccggacgagcccnnn

SEQ ID NO: 9808 - DNA, 75 bp, synthetic construct
  source 1..75: mol_type = other DNA
  misc_difference 73: note = a, c, t, or g, unknown, or other
  misc_difference 74: note = a, c, t, or g, unknown, or other
  misc_difference 75: note = a, c, t, or g, unknown, or other
ggctcgttggtctaggggtatgattctcgcttcgggtgcgagaggtcccgggttcaaatcccggacgagcccnnn

SEQ ID NO: 9809 - DNA, 75 bp, synthetic construct
  source 1..75: mol_type = other DNA
  misc_difference 73: note = a, c, t, or g, unknown, or other
  misc_difference 74: note = a, c, t, or g, unknown, or other
  misc_difference 75: note = a, c, t, or g, unknown, or other
ggctcgttggtctaggggtatgattctcgctttgggtgcgagaggtcccgggttcaaatcccggacgagcccnnn

SEQ ID NO: 9810 - DNA, 85 bp, synthetic construct
  source 1..85: mol_type = other DNA
  misc_difference 83: note = a, c, t, or g, unknown, or other
  misc_difference 84: note = a, c, t, or g, unknown, or other
  misc_difference 85: note = a, c, t, or g, unknown, or other
gtagtcgtggccgagtggttaaggcgatggactagaaatccattggggtttccccgcgcaggttcgaatcctgccgactacgnnn

SEQ ID NO: 9811 - DNA, 85 bp, synthetic construct
  source 1..85: mol_type = other DNA
  misc_difference 83: note = a, c, t, or g, unknown, or other
  misc_difference 84: note = a, c, t, or g, unknown, or other
  misc_difference 85: note = a, c, t, or g, unknown, or other
gctgtgatggccgagtggttaaggcgttggactcgaaatccaatggggtctccccgcgcaggttcgaatcctgctcacagcgnnn

SEQ ID NO: 9812 - DNA, 87 bp, synthetic construct
  source 1..87: mol_type = other DNA
  misc_difference 8: note = a, c, t, or g, unknown, or other
  misc_difference 9: note = a, c, t, or g, unknown, or other
  misc_difference 85: note = a, c, t, or g, unknown, or other
  misc_difference 86: note = a, c, t, or g, unknown, or other
  misc_difference 87: note = a, c, t, or g, unknown, or other
gacgaggnntggccgagtggttaaggcgatggactgctaatccattgtgctctgcacgcgtgggttcgaatcccatcctcgtcgnnn

SEQ ID NO: 9813 - DNA, 85 bp, synthetic construct
  source 1..85: mol_type = other DNA
  misc_difference 83: note = a, c, t, or g, unknown, or other
  misc_difference 84: note = a, c, t, or g, unknown, or other
  misc_difference 85: note = a, c, t, or g, unknown, or other
gtagtcgtggccgagtggttaaggcgatggacttgaaatccattggggtctccccgcgcaggttcgaatcctgccggctacgnnn

SEQ ID NO: 9814 - DNA, 77 bp, synthetic construct
  source 1..77: mol_type = other DNA
  misc_difference 75: note = a, c, t, or g, unknown, or other
  misc_difference 76: note = a, c, t, or g, unknown, or other
  misc_difference 77: note = a, c, t, or g, unknown, or other
ggctccgtggcttagctggttaaagcgcctgtctagtaaacaggagatcctgggttcgaatcccagcggggcctnnn

SEQ ID NO: 9815 - DNA, 78 bp, synthetic construct
  source 1..78: mol_type = other DNA
  misc_difference 4: note = a, c, t, or g, unknown, or other
  misc_difference 13: note = a, c, t, or g, unknown, or other
  misc_difference 17: note = a, c, t, or g, unknown, or other
  misc_difference 20: note = a, c, t, or g, unknown, or other
  misc_difference 43: note = a, c, t, or g, unknown, or other
  misc_difference 51: note = a, c, t, or g, unknown, or other
  misc_difference 67: note = a, c, t, or g, unknown, or other
  misc_difference 69: note = a, c, t, or g, unknown, or other
  misc_difference 76: note = a, c, t, or g, unknown, or other
  misc_difference 77: note = a, c, t, or g, unknown, or other
  misc_difference 78: note = a, c, t, or g, unknown, or other
ggcnctgtggctnagtnggntaaagcgccggtctcgtaaaccnggagatcntgggttcgaatcccancngggcctnnn

SEQ ID NO: 9816 - DNA, 77 bp, synthetic construct
  source 1..77: mol_type = other DNA
  misc_difference 16: note = a, c, t, or g, unknown, or other
  misc_difference 75: note = a, c, t, or g, unknown, or other
  misc_difference 76: note = a, c, t, or g, unknown, or other
  misc_difference 77: note = a, c, t, or g, unknown, or other
ggctccatagctcagngggttagagcactggtcttgtaaaccaggggtcgcgagttcaaatctcgctggggcctnnn

SEQ ID NO: 9817 - DNA, 75 bp, synthetic construct
  source 1..75: mol_type = other DNA
  misc_difference 73: note = a, c, t, or g, unknown, or other
  misc_difference 74: note = a, c, t, or g, unknown, or other
  misc_difference 75: note = a, c, t, or g, unknown, or other
gacctcgtggcgcaacggtagcgcgtctgactccagatcagaaggttgcgtgttcaaatcacgtcggggtcannn

SEQ ID NO: 9818 - DNA, 76 bp, synthetic construct
  source 1..76: mol_type = other DNA
  misc_difference 74: note = a, c, t, or g, unknown, or other
  misc_difference 75: note = a, c, t, or g, unknown, or other
  misc_difference 76: note = a, c, t, or g, unknown, or other
gtttccgtagtgtagtggttatcacgttcgcctaacacgcgaaaggtccccggttcgaaaccgggcggaaacannn

SEQ ID NO: 9819 - DNA, 76 bp, synthetic construct
  source 1..76: mol_type = other DNA
  misc_difference 74: note = a, c, t, or g, unknown, or other
  misc_difference 75: note = a, c, t, or g, unknown, or other
  misc_difference 76: note = a, c, t, or g, unknown, or other
gtttccgtagtgtagtggttatcacgttcgcctcacacgcgaaaggtccccggttcgaaaccgggcggaaacannn

SEQ ID NO: 9820 - DNA, 76 bp, synthetic construct
  source 1..76: mol_type = other DNA
  misc_difference 74: note = a, c, t, or g, unknown, or other
  misc_difference 75: note = a, c, t, or g, unknown, or other
  misc_difference 76: note = a, c, t, or g, unknown, or other
ggttccatagtgtagtggttatcacgtctgctttacacgcagaaggtcctgggttcgagccccagtggaaccannn

SEQ ID NO: 9821 - DNA, 75 bp, synthetic construct
  source 1..75: mol_type = other DNA
  misc_difference 73: note = a, c, t, or g, unknown, or other
  misc_difference 74: note = a, c, t, or g, unknown, or other
  misc_difference 75: note = a, c, t, or g, unknown, or other
agcagagtggcgcagcggaagcgtgctgggcccataacccagaggtcgatggatcgaaaccatcctctgctannn
